(19) United States
(12) Patent Application Publication
(10) Pub. No.: US 2025/0002887 A1
(43) Pub. Date: Jan. 2, 2025

(54) ENGINEERED ACID ALPHA-GLUCOSIDASE VARIANTS

(71) Applicant: Crosswalk Therapeutics, Inc., Cambridge, MA (US)

(72) Inventors: Rachel Cathleen Botham, Burlingame, CA (US); Gordon Michael Cheung, San Jose, CA (US); William Casey Hallows, San Francisco, CA (US); Gjalt W. Huisman, Redwood City, CA (US); Nikki D. Kruse, San Carlos, CA (US); Jessica P. Lao, Emeryville, CA (US); Shilpa Maroju, Union City, CA (US); Adam P. Silverman, San Carlos, CA (US)

(21) Appl. No.: 18/759,313

(22) Filed: Jun. 28, 2024

Related U.S. Application Data
(60) Provisional application No. 63/511,347, filed on Jun. 30, 2023.

(51) Int. Cl. C12N 9/24; A61K 38/47; C12N 15/85

(52) U.S. Cl. CPC C12N 9/2402; A61K 38/47; C12N 15/85; C12Y 302/0102

(57) ABSTRACT

The present disclosure provides engineered acid alpha-glucosidase polypeptides, recombinant polynucleotides encoding the engineered acid alpha-glucosidase polypeptides, and method of using the engineered acid alpha-glucosidase polypeptides and the recombinant polynucleotides for therapeutic purposes.

### CROSS-REFERENCE TO RELATED APPLICATIONS

[0001] This application claims the benefit of U.S. Provisional Application No. 63/511,347, filed Jun. 30, 2023, which is incorporated by reference herein in its entirety.

### REFERENCE TO SEQUENCE LISTING, TABLE OR COMPUTER PROGRAM

[0002] The Sequence Listing concurrently submitted herewith as a file name CX7-223US1_ST26.xml, created on Jun. 28, 2024, with a file size of 2,391,488 bytes, is part of the specification and is incorporated by reference herein.

### TECHNICAL FIELD

[0003] The present disclosure relates to engineered acid alpha-glucosidase (GAA) polypeptides, compositions thereof, polynucleotides encoding the engineered acid alpha-glucosidase polypeptides, and uses of the engineered polypeptides for therapeutic and other purposes.

### BACKGROUND

[0004] Pompe disease is an autosomal recessive lysosomal storage disorder caused by mutations in the gene encoding acid alpha-glucosidase (GAA). This genetic defect leads to reduction in or absence of acid alpha-glucosidase in the body tissues. The resulting accumulation of glycogen in the lysosomes results in lysosomal swelling and rupture, which can lead to cell damage, organelle dysfunction, and other cellular defects. There are two primary forms of Pompe disease, including the classical infantile form and late-onset (childhood or adulthood) form, with some patients displaying an intermediate phenotype. Disease severity is related to the amount of enzyme activity present in the cells of affected individuals. The infantile form is the most severe and a rapidly progressive form, typically with acid alpha-glucosidase activity that is less than 1%, resulting in marked accumulation of glycogen in skeletal muscle as well as heart and other tissues (see, e.g., Hahn and Schanzer, Ann. Transl. Med., 2019, 7:283). In these patients, there is multi-system storage of accumulated lysosomal and non-lysosomal bound-glycogen in the heart, skeletal muscle, and brain tissue (see, e.g., Schoser, Ann. Transl. Med., 2019, 7:292). Patients have elevated creatine kinase levels, hypertrophic cardiomyopathy, failure to thrive, muscular hypotonia, and axial muscle weakness. If untreated, patients typically die within the first year of life due to cardiorespiratory insufficiency. Survival beyond 18 months of age is exceptional.

[0005] The infantile form is distinguished from non-classic or late-infantile Pompe disease in which patients display much less severe cardiac hypertrophy. Patients with late-onset Pompe disease typically experience progressive limb-girdle myopathy and respiratory dysfunction. These patients present with predominant, but not exclusive, muscle involvement. The patients eventually become wheelchair and/or ventilator-dependent. Respiratory insufficiency is the leading cause of death in these patients. Some patients may synthesize a non-functional form of acid alpha-glucosidase, but others do not produce any cross-reactive immunologic material of the native enzyme.

[0006] The human gene encoding acid alpha-glucosidase has been localized to chromosome 17q25.2-q25.3 and has been cloned and sequenced (see, e.g., Peruzzo et al., Ann. Transl. Med., 2019, 7:278-287; and Martiniuk et al., DNA Cell. Biol., 1991, 10:283-292). Although numerous mutations in the gene have been reported, the pathological mechanisms that lead to the wide range of phenotypes observed in affected patients remain unknown. Despite the availability of enzyme replacement therapy (ERT) utilizing recombinant human acid alpha-glucosidase, there remains the need for better treatment and management options for affected patients.

### SUMMARY

[0007] The present disclosure provides acid alpha-glucosidase polypeptides engineered to have improved properties, particularly as compared to the naturally occurring human acid alpha-glucosidase.

[0008] In some embodiments, the present disclosure provides an engineered acid alpha-glucosidase polypeptide, or biologically active fragment thereof, comprising an amino acid sequence having at least 80%, 81%, 82%, 83%, 84%, 85%, 86%, 87%, 88%, 89%, 90%, 91%, 92%, 93%, 94%, 95%, 96%, 97%, 98%, or 99% or more sequence identity to a reference sequence corresponding to residues 20-944 of an even numbered SEQ ID NO. of SEQ ID NOs: 2, 12, and 14-754, or to an even numbered SEQ ID NO. of SEQ ID NOs: 2, 12, and 14-754, wherein the amino acid sequence comprises one or more substitutions relative to the reference sequence corresponding to residues 20-944 of SEQ ID NO: 12 or 2, or relative to the reference sequence corresponding to SEQ ID NO: 12 or 2.

[0009] In some embodiments, the engineered acid alpha-glucosidase, or biologically active fragment thereof, comprises an amino acid sequence having at least 80%, 81%, 82%, 83%, 84%, 85%, 86%, 87%, 88%, 89%, 90%, 91%, 92%, 93%, 94%, 95%, 96%, 97%, 98%, or 99% or more sequence identity to a reference sequence corresponding to residues 20 to 944 of SEQ ID NO: 12 or 2, or to a reference sequence corresponding to SEQ ID NO: 12 or 2, wherein the amino acid sequence comprises one or more substitutions relative to the reference sequence corresponding to residues 20 to 944 of SEQ ID NO: 12 or 2, or relative to the reference sequence corresponding to SEQ ID NO: 12 or 2.

[0010] In some embodiments, the engineered acid alpha-glucosidase comprises an amino acid sequence having at least 80%, 81%, 82%, 83%, 84%, 85%, 86%, 87%, 88%, 89%, 90%, 91%, 92%, 93%, 94%, 95%, 96%, 97%, 98%, or 99% or more sequence identity to a reference sequence corresponding to residues 20-944 of an even numbered SEQ ID NO. of SEQ ID NOs: 14-754, or to an even numbered SEQ ID NO. of SEQ ID NOs: 14-754, wherein the amino acid sequence comprises one or more substitutions relative to the reference sequence corresponding to residues 20-944 of SEQ ID NO: 12 or 2, or relative to the reference sequence corresponding to SEQ ID NO: 12 or 2.

[0011] In some embodiments, the amino acid sequence of the engineered acid alpha-glucosidase comprises at least a substitution at amino acid position 24, 28, 29, 39, 50, 62, 78, 87, 135, 150, 266, 267, 305, 437, 486, 522, 569, 670, 692, 711, 736, 750, 812, 830, 842, 871, 883, 894, 913, or 932, or combinations thereof, wherein the amino acid positions are relative to the reference sequence corresponding to residues 20-944 of SEQ ID NO: 12, or relative to the reference sequence corresponding to SEQ ID NO: 12.

[0012] In some embodiments, the amino acid sequence of the engineered acid alpha-glucosidase comprises at least a substitution 24A/C/D/E/F/G/H/I/K/L/M/N/P/R/S/T/V/Y, 28A/C/D/E/F/G/H/K/L/P/Q/R/T/V/W, 29A/C/D/E/F/G/H/I/K/L/M/N/P/Q/R/S/V/W/Y, 39A/E/F/G/I/L/N/T, 50A/C/D/E/F/G/H/I/K/L/M/N/Q/R/S/T/W/Y, 62A/D/E/F/G/H/I/K/M/N/P/Q/S/T/V/Y, 78A/C/D/F/G/H/I/K/L/M/N/P/Q/R/S/T/V/W/Y, 87A/D/G/H/I/K/L/MN/Q/R/S/T/V/W, 135A/C/D/E/F/G/H/I/K/L/N/P/R/Y, 150T, 266A/D/E/H/K/Q/T, 267H/L/R/T/V, 305V, 437A/H/S, 486A/C/D/F/G/H/I/K/L/M/N/Q/R/S/T/V/W/Y, 522A/C/D/E/F/G/H/I/K/L/M/N/P/Q/R/S/T/W/Y, 569A/C/D/E/G/H/I/K/L/M/N/P/Q/R/S/V/W/Y, 670A/D/E/F/G/H/I/K/L/M/N/Q/R/S/V/Y, 692A/C/D/E/F/H/I/K/L/M/N/Q/R/S/T/V/W/Y, 711A/C/D/E/F/G/I/K/L/M/N/Q/R/S/T/V/W/Y, 736F/L, 750A/E/K/L/Q/R, 812A/D/G/S, 830D/E/F/G/H/L/M/N/Q/S/T/V/W/Y, 842A/C/D/E/F/G/H/K/L/M/N/Q/R/T/W, 871A/C/D/F/G/H/I/K/L/M/N/Q/R/S/T/V/W/Y, 883A/F/Q, 894A/C/D/E/H/I/K/L/M/N/Q/R/S/T/V/W/Y, 913E/F/H/I/K/M/N/Q/S/W, or 932C/D/E/G/H/K/L/M/N/P/Q/R/S/T/W/Y, or combinations thereof, wherein the amino acid positions are relative to the reference sequence corresponding to residues 20-944 of SEQ ID NO: 12, or relative to the reference sequence corresponding to SEQ ID NO: 12.

[0013] In some embodiments, the amino acid sequence of the engineered acid alpha-glucosidase comprises at least a substitution 24A/C/D/F/G/H/I/K/M/N/P/S/T/V/Y, 28A/C/D/E/F/G/H/K/Q/T/V/W, 29A/C/D/E/F/G/H/I/K/M/N/P/R/W/Y, 39A/E/F/G/I/L/N/T, 50A/C/D/E/F/H/I/K/M/N/R/S/T/W/Y, 62D/H/I/K/M/N/P/Q/Y, 78A/C/D/F/G/H/I/K/L/M/N/Q/R/S/T/V/W/Y, 87A/G/H/I/K/L/MN/Q/R/S/T/V/W, 135C/D/E/F/G/H/I/K/L/N/R/Y, 266A/D/E/H/K/Q, 267H/L/T/V, 305V, 437A/H, 486C/D/F/G/H/I/K/L/M/N/Q/R/S/V/W/Y, 522A/C/D/F/G/H/I/K/L/M/N/P/Q/R/S/T/W/Y, 569A/C/D/E/G/K/M/N/P/R/W, 670A/D/G/H/K/M/Y, 692A/D/E/H/K/L/M/N/T/W, 711D/E/I/K/M/N/Q/S/T/V/Y, 736F/L, 750E/K/L/Q/R, 812A/D/G/S, 830D/E/F/G/H/L/M/N/S/T/W/Y, 842A/C/D/F/H/K/L/M/N/Q/R/T/W, 871A/C/D/F/H/I/M/N/Q/T/V/W/Y, 883A/F/Q, 894A/D/E/H/I/K/L/M/N/S/T/V/W/Y, 913F/IK/M/N/S, or 932C/D/E/G/H/K/L/M/N/P/Q/R/W/Y, or combinations thereof, wherein the amino acid positions are relative to the reference sequence corresponding to residues 20-944 of SEQ ID NO: 12, or relative to the reference sequence corresponding to SEQ ID NO: 12.

[0014] In some embodiments, the amino acid sequence of the engineered acid alpha-glucosidase comprises a sequence comprising residues 20 to 944 of an even-numbered SEQ ID NO. of SEQ ID NOs: 14-754, or a sequence comprising an even-numbered SEQ ID NO. of SEQ ID NOs: 14-754.

[0015] In some embodiments, the amino acid sequence of the engineered acid alpha-glucosidase comprises a sequence comprising residues 20 to 944 of SEQ ID NO: 14, 114, 126, 170, 250, 252, 394, 472, 488, or 506, or a sequence comprising SEQ ID NO: 14, 114, 126, 170, 250, 252, 394, 472, 488, or 506.

[0016] In some embodiments, the engineered acid alpha-glucosidase exhibits at least one improved property compared to a reference acid alpha-glucosidase. In some embodiments, engineered acid alpha-glucosidase exhibits at least one improved property selected from: i) enhanced catalytic activity; ii) increased tolerance to pH 7; iii) increased tolerance to pH 4.4; iv) increased stability in lysosomes; v) increased expression in cells; vi) increased uptake into cells; vii) increased enzymatic activity in cell lysates; viii) increased stability in plasma/serum; and ix) reduced immunogenicity; or a combination of any of i), ii), iii), iv), v), vi), vii), viii), and ix), as compared to a reference acid alpha-glucosidase having a sequence corresponding to residues 20 to 944 of SEQ ID NO: 2 or 12, or a sequence corresponding to SEQ ID NO: 2 or 12.

[0017] In a further aspect, the present disclosure provides a recombinant polynucleotide comprising a polynucleotide sequence encoding an engineered acid alpha-glucosidase disclosed herein.

[0018] In some embodiments, the recombinant polynucleotide comprises a polynucleotide sequence having at least 70%, 75%, 80%, 81%, 82%, 83%, 84%, 85%, 86%, 87%, 88%, 89%, 90%, 91%, 92%, 93%, 94%, 95%, 96%, 97%, 98%, or 99% or more sequence identity to a reference polynucleotide sequence corresponding to nucleotide residues 58-2832 of an odd-numbered SEQ ID NO. of SEQ ID NOs: 13-753, or to a reference polynucleotide sequence corresponding to an odd-numbered SEQ ID NO. of SEQ ID NOs: 13-753, wherein the polynucleotide encodes an acid alpha-glucosidase.

[0019] In some embodiments, the recombinant polynucleotide encoding an engineered acid alpha-glucosidase comprises a polynucleotide sequence codon optimized for expression of the engineered acid alpha-glucosidase.

[0020] In some embodiments, the recombinant polynucleotide comprises a polynucleotide sequence comprising nucleotide residues 58-2832 of an odd-numbered SEQ ID NO. of SEQ ID NOs: 13-753, or a polynucleotide sequence comprising an odd-numbered SEQ ID NO. of SEQ ID NOs: 13-753.

[0021] In a further aspect, the present disclosure provides an expression vector comprising a recombinant polynucleotide encoding an engineered acid alpha-glucosidase described herein. In some embodiments, the expression vector comprises a control sequence operably linked to a recombinant polynucleotide encoding an engineered acid alpha-glucosidase. In some embodiments, the control sequence is a promoter, such as a heterologous promoter.

[0022] In another aspect, provide herein are host cells comprising an expression vector comprising the recombinant polynucleotide described herein. In some embodiments, the host cell is a eukaryotic or prokaryotic cell. In some embodiments, the host cell is a mammalian cell, particularly a human cell. In some embodiments, the human cell is from a patient having a deficiency in acid alpha-glucosidase activity, for example a patient afflicted with Pompe disease.

[0023] In another aspect, the host cells are used to produce an engineered acid alpha-glucosidase disclosed herein. In some embodiments, a method of producing an engineered acid alpha-glucosidase, comprising culturing the host cell comprising an expression vector under suitable conditions such that the engineered acid alpha-glucosidase is produced.

[0024] In another aspect, the present disclosure provides a pharmaceutical composition comprising an engineered acid alpha-glucosidase or a recombinant polynucleotide encoding the engineered acid alpha-glucosidase, including an expression vector comprising the recombinant polynucleotide. In some embodiments, the pharmaceutical composition further comprises a pharmaceutically acceptable carrier and/or excipient.

[0025] In another aspect, the engineered acid alpha-glucosidase or the recombinant polynucleotide encoding the engineered acid alpha-glucosidase is used for treating a subject with a deficiency in acid alpha-glucosidase activity. In some embodiments, a method for treating and/or preventing symptoms of a deficiency in acid alpha-glucosidase in a subject, comprises administering to a subject in need thereof an effective amount of an engineered acid alpha-glucosidase or a recombinant polynucleotide encoding the engineered acid alpha-glucosidase disclosed herein.

[0026] In some embodiments, a pharmaceutical composition comprising the engineered acid alpha-glucosidase or the recombinant polynucleotide encoding the engineered acid alpha-glucosidase is administered to a subject.

[0027] In some embodiments, the subject for treatment is afflicted with Pompe disease. In some embodiments, the subject is an infant or child. In some embodiments, the subject is an adult or young adult.

[0028] In a further aspect, the present disclosure provides for use of an engineered acid alpha-glucosidase or a recombinant polynucleotide encoding the engineered acid alpha-glucosidase, or a pharmaceutical composition thereof for treating a deficiency in acid alpha-glucosidase activity. In some embodiments, the deficiency in acid alpha-glucosidase is Pompe disease.

### BRIEF DESCRIPTION OF THE DRAWINGS

[0029] FIG. 1 provides a graph showing the duration of stability of six GAA variants in neutral pH cell culture medium, as described in Example 6.

[0030] FIG. 2 provides a graph showing the melting temperature of six GAA variants at lysosomal (4.4) and slightly basic (7.4) pH, as described in Example 6.

[0031] FIG. 3 provides a graph showing the duration of stability of six GAA variants when challenged by treatment with plasma, as described in Example 6.

[0032] FIG. 4 provides graphs showing the 4-MU-GLU hydrolysis activity in lysates from cultured Pompe patient derived fibroblasts treated with seven purified GAA variants for durations of 1 hour (Panel 4A), 4 hours (Panel 4B), 24 hours (Panel 4C), or 96 hours (Panel 4D), wash-out of GAA material, and incubation at 37° C. until 96 hours post treatment, as described in Example 6. Values are expressed as RFU activity.

[0033] FIG. 5 provides graphs showing the 4-MU-GLU hydrolysis activity in lysates from cultured C2C12 GAA knockout myoblasts treated with seven purified GAA variants for durations of 1 hour (Panel 5A), 4 hours (Panel 5B), 24 hours (Panel 5C), or 96 hours (Panel 5D), wash-out of GAA material, and incubation at 37° C. until 96 hr post treatment, as described in Example 6. Values are expressed as RFU activity.

[0034] FIG. 6 provides a graph showing the 4-MU-GLU hydrolysis activity in the supernatant of cultures of C2C12 GAA knockout myoblasts that were transfected with plasmid DNA of six GAA variants.

[0035] FIG. 7 provides graphs showing the GAA activity (4-MU-GLU hydrolysis shown in Panel 7A, and glycogen hydrolysis shown in Panel 7B) in normalized lysates of C2C12 GAA knockout myoblasts that were transfected with plasmid DNA of six GAA variants.

[0036] FIG. 8 shows in Panel 8A the sum of all high quality GAA-derived peptides that were observed by mass spectrometry from each GAA variant in an ex vivo MHC II associated peptide proteomics assay (MAPPs assay), and in Panel 8B the peptide frequency across donors plotted against the region of the GAA sequence from which the peptide was processed from for each GAA variant. In the MAPPs assay, PBMCs from healthy donors were differentiated into dendritic cells (antigen presenting cells) and incubated in the presence of GAA variants (the antigen). HLA-binding peptides are then eluted from HLA-DR molecules and identified by mass spectrometry, providing information on the processing and presentation of peptides in antigen presenting cells. These results indicate that GAA variants of SEQ ID NO: 6, SEQ ID NO: 8, and SEQ ID NO: 14 have significantly reduced processing and reduced frequency of peptide presentation as compared to the WT GAA, SEQ ID NO: 2.

### DETAILED DESCRIPTION

[0037] The present disclosure provides engineered acid alpha-glucosidase (GAA) polypeptides and compositions thereof. In some embodiments, the engineered acid alpha-glucosidase polypeptides are engineered to display improved properties, including enhanced catalytic activity and enhanced acid stability, while reducing sensitivity to proteolysis. The present disclosure also provides methods for using the engineered acid alpha-glucosidase polypeptides, including compositions thereof, for therapeutic and other purposes.

### Abbreviations and Definitions

[0038] In reference to the present disclosure, the technical and scientific terms used in the descriptions herein will have the meanings commonly understood by one of ordinary skill in the art, unless specifically defined otherwise.

[0039] It is to be understood that the invention described herein is not limited to the particular methodology, protocols, and reagents described, as these may vary, depending upon the context they are used by those of skill in the art. Accordingly, the terms defined immediately below are more fully described by reference to the application as a whole.

[0040] Furthermore, the section headings provided herein are not to be construed as limitations of the various aspects or embodiments of the invention which can be had by reference to the application as a whole.

[0041] As used herein, the singular “a”, “an,” and “the” include the plural references, unless the context clearly indicates otherwise.

[0042] As used herein, the term “comprising” and its cognates are used in their inclusive sense (i.e., equivalent to the term “including” and its corresponding cognates).

[0043] It is also to be understood that where description of embodiments use the term “comprising” and its cognates, the embodiments can also be described using language “consisting essentially of” or “consisting of.”

[0044] Moreover, numeric ranges are inclusive of the numbers defining the range. Thus, every numerical range disclosed herein is intended to encompass every narrower numerical range that falls within such broader numerical range, as if such narrower numerical ranges were all expressly written herein. It is also intended that every maximum (or minimum) numerical limitation disclosed herein includes every lower (or higher) numerical limitation, as if such lower (or higher) numerical limitations were expressly written herein.

[0045] “About” means an acceptable error for a particular value. In some instances, “about” means within 0.05%, 0.5%, 1.0%, or 2.0%, of a given value range. In some instances, “about” means within 1, 2, 3, or 4 standard deviations of a given value. In some instances, “about” encompasses values that are within 2.5%, 3%, 3.5%, 4%, 4.5%, 5%, 5.5%, 6%, 6.5%, 7%, 7.5%, 8%, 8.5%, 9%, 9.5%, or 10% of a given value.

[0046] “EC” number refers to the Enzyme Nomenclature of the Nomenclature Committee of the International Union of Biochemistry and Molecular Biology (NC-IUBMB). The IUBMB biochemical classification is a numerical classification system for enzymes based on the chemical reactions they catalyze.

[0047] “ATCC” refers to the American Type Culture Collection whose biorepository collection includes genes and strains.

[0048] “NCBI” refers to National Center for Biological Information and the sequence databases provided therein.

[0049] “Protein,” “polypeptide,” and “peptide” are used interchangeably herein to denote a polymer of at least two amino acids covalently linked by an amide bond, regardless of length or post-translational modification (e.g., glycosylation or phosphorylation).

[0050] “Amino acids” are referred to herein by either their commonly known three-letter symbols or by the one-letter symbols recommended by IUPAC-IUB Biochemical Nomenclature Commission. The abbreviations used for the genetically encoded amino acids are conventional and are as follows: alanine (Ala or A), arginine (Arg or R), asparagine (Asn or N), aspartate (Asp or D), cysteine (Cys or C), glutamate (Glu or E), glycine (Gly or G), glutamine (Gln or Q), histidine (His or H), isoleucine (Ile or I), leucine (Leu or L), lysine (Lys or K), methionine (Met or M), phenylalanine (Phe or F), proline (Pro or P), serine (Ser or S), threonine (Thr or T), tryptophan (Trp or W), tyrosine (Tyr or Y), and valine (Val or V). When the three-letter abbreviations are used, unless specifically preceded by an “L” or a “D” or clear from the context in which the abbreviation is used, the amino acid may be in either the L- or D-configuration about α-carbon (Cα). For example, whereas “Ala” designates alanine without specifying the configuration about the α-carbon, “D-Ala” and “L-Ala” designate D-alanine and L-alanine, respectively. When the one-letter abbreviations are used, upper case letters designate amino acids in the L-configuration about the α-carbon and lower case letters designate amino acids in the D-configuration about the α-carbon. For example, “A” designates L-alanine and “a” designates D-alanine. When polypeptide sequences are presented as a string of one-letter or three-letter abbreviations (or mixtures thereof), the sequences are presented in the amino (N) to carboxy (C) direction in accordance with common convention.

[0051] “Fusion protein,” and “chimeric protein” and “chimera” refer to hybrid proteins created through the joining of two or more polynucleotides that originally encode separate proteins. In some embodiments, fusion proteins are created by recombinant technology (e.g., molecular biology techniques known in the art).

[0052] “Acid alpha-glucosidase,” “acid α-glucosidase,” “acid alpha-glucosidase polypeptide” “lysosomal alpha-glucosidase,” and “GAA” refer to enzymes within a family (EC 3.2.1.20) of enzymes that break down glycogen present in lysosomes. The enzyme is also sometimes referred to as “alpha-1,4-glucosidase,” α-1,4-glucosidase,” “acid maltase,” “glucoinvertase,” “glucosidosucrase,” “lysosomal alpha-glucosidase,” “lysosomal α-glucosidase,” “maltase,” or “maltase-glucoamylase.” One reaction catalyzed by the enzyme is the hydrolysis of terminal, non-reducing (1 to 4) linked alpha-D-glucose residues with release of alpha-D-glucose. As used herein, the term “rhGAA” refers to recombinant human acid alpha-glucosidase.

[0053] “Pompe disease” refers to a glycogen storage disease type II, which is typically an autosomal recessive genetic disorder that results in a metabolic disorder characterized by lysosomal accumulation of glycogen in skeletal muscle and other tissues. It is characterized based on age of onset, organ involvement, severity, and rate of progression. The more severe form is infantile-onset Pompe disease (IOPD), which occurs in infants. The other form, referred to as “late-onset Pompe disease” (LOPD), occurs in individuals with an onset of disease before 12 months of age, but without the cardiomyopathy associated with IOPD, and all individuals with an onset of disease after 12 months of age. Synonyms for Pompe disease include “acid alpha-glucosidase deficiency,” “acid maltase deficiency,” “GAA deficiency,” “glycogen storage disease type II,” “GSD II,” “GSD2,” and “glycogenosis type II.”

[0054] “Polynucleotide,” “nucleic acid,” or “oligonucleotide” is used herein to denote a polymer comprising at least two nucleotides where the nucleotides are either deoxyribonucleotides or ribonucleotides or mixtures of deoxyribonucleotides and ribonucleotides. In some embodiments, the abbreviations used for genetically encoding nucleosides are conventional and are as follows: adenosine (A); guanosine (G); cytidine (C); thymidine (T); and uridine (U). Unless specifically delineated, the abbreviated nucleosides may be either ribonucleosides or 2′-deoxyribonucleosides. The nucleosides may be specified as being either ribonucleosides or 2′-deoxyribonucleosides on an individual basis or on an aggregate basis. When a polynucleotide, nucleic acid, or oligonucleotide sequences are presented as a string of one-letter abbreviations, the sequences are presented in the 5′ to 3′ direction in accordance with common convention, and the phosphates are not indicated. The term “DNA” refers to deoxyribonucleic acid. The term “RNA” refers to ribonucleic acid. The polynucleotide or nucleic acid may be single-stranded or double-stranded, or may include both single-stranded regions and double-stranded regions.

[0055] “Engineered,” “recombinant,” “non-naturally occurring,” and “variant,” when used with reference to a cell, a polynucleotide or a polypeptide refers to a material or a material corresponding to the natural or native form of the material that has been modified in a manner that would not otherwise exist in nature or is identical thereto but produced or derived from synthetic materials and/or by manipulation using recombinant techniques.

[0056] “Wild-type” and “naturally-occurring” refer to the form found in nature. For example, a wild-type polypeptide or polynucleotide sequence is a sequence present in an organism that can be isolated from a source in nature and which has not been intentionally modified by human manipulation. In some embodiments, “wild-type” and “naturally-occurring” refer to the form found in nature that has normal function and/or activity.

[0057] “Coding sequence” refers to that part of a nucleic acid (e.g., a gene) that encodes an amino acid sequence of a protein.

[0058] “Percent (%) sequence identity” is used herein to refer to comparisons among polynucleotides and polypeptides, and are determined by comparing two optimally aligned sequences over a comparison window, wherein the portion of the polynucleotide or polypeptide sequence in the comparison window may comprise additions or deletions (i.e., gaps) as compared to the reference sequence for optimal alignment of the two sequences. The percentage may be calculated by determining the number of positions at which the identical nucleic acid base or amino acid residue occurs in both sequences to yield the number of matched positions, dividing the number of matched positions by the total number of positions in the window of comparison and multiplying the result by 100 to yield the percentage of sequence identity. Alternatively, the percentage may be calculated by determining the number of positions at which either the identical nucleic acid base or amino acid residue occurs in both sequences or a nucleic acid base or amino acid residue is aligned with a gap to yield the number of matched positions, dividing the number of matched positions by the total number of positions in the window of comparison and multiplying the result by 100 to yield the percentage of sequence identity. Those of skill in the art appreciate that there are many established algorithms available to align two sequences. Optimal alignment of sequences for comparison can be conducted, e.g., by the local homology algorithm of Smith and Waterman (Smith and Waterman, Adv. Appl. Math., 1981, 2:482), by the homology alignment algorithm of Needleman and Wunsch (Needleman and Wunsch, J. Mol. Biol., 1970, 48:443), by the search for similarity method of Pearson and Lipman (Pearson and Lipman, Proc. Natl. Acad. Sci. USA, 1988, 85:2444), by computerized implementations of these algorithms (e.g., GAP, BESTFIT, FASTA, and TFASTA in the GCG Wisconsin Software Package), or by visual inspection, as known in the art. Examples of algorithms that are suitable for determining percent sequence identity and sequence similarity include, but are not limited to the BLAST and BLAST 2.0 algorithms, which are described by Altschul et al. (See, Altschul et al., J. Mol. Biol., 1990, 215:403-410; and Altschul et al., Nucleic Acids Res., 1997, 25(17):3389-3402, respectively). Software for performing BLAST analyses is publicly available through the National Center for Biotechnology Information website. This algorithm involves first identifying high scoring sequence pairs (HSPs) by identifying short words of length W in the query sequence, which either match or satisfy some positive-valued threshold score T when aligned with a word of the same length in a database sequence. T is referred to as, the neighborhood word score threshold (See, Altschul et al., supra). These initial neighborhood word hits act as seeds for initiating searches to find longer HSPs containing them. The word hits are then extended in both directions along each sequence for as far as the cumulative alignment score can be increased. Cumulative scores are calculated using, for nucleotide sequences, the parameters M (reward score for a pair of matching residues; always >0) and N (penalty score for mismatching residues; always <0). For amino acid sequences, a scoring matrix is used to calculate the cumulative score. Extension of the word hits in each direction are halted when: the cumulative alignment score falls off by the quantity X from its maximum achieved value; the cumulative score goes to zero or below, due to the accumulation of one or more negative-scoring residue alignments; or the end of either sequence is reached. The BLAST algorithm parameters W, T, and X determine the sensitivity and speed of the alignment. The BLASTN program (for nucleotide sequences) uses as defaults a wordlength (W) of 11, an expectation (E) of 10, M=5, N=−4, and a comparison of both strands. For amino acid sequences, the BLASTP program uses as defaults a wordlength (W) of 3, an expectation (E) of 10, and the BLOSUM62 scoring matrix (See, Henikoff and Henikoff, Proc. Natl. Acad. Sci. USA, 1989, 89:10915). Exemplary determination of sequence alignment and % sequence identity can employ the BESTFIT or GAP programs in the GCG Wisconsin Software package (Accelrys, Madison WI), using default parameters provided.

[0059] “Reference sequence” refers to a defined sequence used as a basis for a sequence comparison. A reference sequence may be a subset of a larger sequence, for example, a segment of a full-length gene or polypeptide sequence. Generally, a reference sequence is at least 20 nucleotide or amino acid residues in length, at least 25 residues in length, at least 50 residues in length, at least 100 residues in length or the full length of the nucleic acid or polypeptide. Since two polynucleotides or polypeptides may each (1) comprise a sequence (i.e., a portion of the complete sequence) that is similar between the two sequences, and (2) may further comprise a sequence that is divergent between the two sequences, sequence comparisons between two (or more) polynucleotides or polypeptide are typically performed by comparing sequences of the two polynucleotides or polypeptides over a “comparison window” to identify and compare local regions of sequence similarity. In some embodiments, a “reference sequence” can be based on a primary amino acid sequence, where the reference sequence is a sequence that can have one or more changes in the primary sequence.

[0060] “Comparison window” refers to a conceptual segment of contiguous nucleotide positions or amino acids residues wherein a sequence may be compared to a reference sequence. In some embodiments, the comparison window is at least 15 to 20 contiguous nucleotides or amino acids and wherein the portion of the sequence in the comparison window may comprise additions or deletions (i.e., gaps) of 20 percent or less as compared to the reference sequence (which does not comprise additions or deletions) for optimal alignment of the two sequences. In some embodiments, the comparison window can be longer than 15-20 contiguous residues, and includes, optionally 30, 40, 50, 100, or longer windows.

[0061] “Corresponding to”, “reference to” or “relative to” when used in the context of the numbering of a given amino acid or polynucleotide sequence refers to the numbering of the residues of a specified reference sequence when the given amino acid or polynucleotide sequence is compared to the reference sequence. In other words, the residue number or residue position of a given polymer is designated with respect to the reference sequence rather than by the actual numerical position of the residue within the given amino acid or polynucleotide sequence. For example, a given amino acid sequence, such as that of an engineered acid alpha-glucosidase, can be aligned to a reference sequence by introducing gaps to optimize residue matches between the two sequences. In these cases, although the gaps are present, the numbering of the residue in the given amino acid or polynucleotide sequence is made with respect to the reference sequence to which it has been aligned.

[0062] “Mutation” refers to the alteration of a nucleic acid sequence. In some embodiments, mutations result in changes to the encoded polypeptide sequence (i.e., as compared to the original sequence without the mutation). In some embodiments, the mutation comprises a substitution, such that a different amino acid is produced. In some alternative embodiments, the mutation comprises an addition, such that an amino acid is added (e.g., insertion) to the original polypeptide sequence. In some further embodiments, the mutation comprises a deletion, such that an amino acid is deleted from the original polypeptide sequence. Any number of mutations may be present in a given sequence.

[0063] “Amino acid difference” or “residue difference” refers to a difference in the amino acid residue at a position of a polypeptide sequence relative to the amino acid residue at a corresponding position in a reference sequence. The positions of amino acid differences generally are referred to herein as “Xn,” where n refers to the corresponding position in the reference sequence upon which the residue difference is based. For example, a “residue difference at position X24 as compared to SEQ ID NO: 12” refers to a difference of the amino acid residue at the polypeptide position corresponding to position 24 of SEQ ID NO: 12. Thus, if the reference polypeptide of SEQ ID NO: 12 has a tryptophan at position 24, then a “residue difference at position X24 as compared to SEQ ID NO: 2” an amino acid substitution of any residue other than tryptophan at the position of the polypeptide corresponding to position 24 of SEQ ID NO: 12. In most instances herein, the specific amino acid residue difference at a position is indicated as “XnY” where “Xn” specifies the corresponding position as described above, and “Y” is the single letter identifier of the amino acid found in the engineered polypeptide (i.e., the different residue than in the reference polypeptide). In some instances (e.g., as shown in in Table 3-1), the present disclosure also provides specific amino acid differences denoted by the conventional notation “AnB”, where A is the single letter identifier of the residue in the reference sequence, “n” is the number of the residue position in the reference sequence, and B is the single letter identifier of the residue substitution in the sequence of the engineered polypeptide. In some embodiments, the amino acid difference, e.g., a substitution, is denoted by the abbreviation “nB,” without the identifier for the residue in the reference sequence. In some embodiments, the phrase “an amino acid residue nB” denotes the presence of the amino residue in the engineered polypeptide, which may or may not be a substitution in context of a reference sequence.

[0064] In some instances, a polypeptide of the present disclosure can include one or more amino acid residue differences relative to a reference sequence, which is indicated by a list of the specified positions where residue differences are present relative to the reference sequence. In some embodiments, where more than one amino acid can be used in a specific residue position of a polypeptide, the various amino acid residues that can be used are separated by a “/” (e.g., X24A/X24C or X24A/C or 24A/C). In some embodiments, the amino acid residue is selected from the various alternative amino acid residues listed for that residue position. In some embodiments, the polypeptide variants comprise more than one substitution. These substitutions are separated by a slash for ease in reading (e.g., L24W/L28S or 24W/28S) or by a semicolon, as noted below. In some cases, as noted in the foregoing, the “X” does not precede the position number in the present application.

[0065] “Amino acid substitution set” and “substitution set” refers to a group of amino acid substitutions within a polypeptide sequence. In some embodiments, substitution set comprises 2, 3, 4, 5, 6, 7, 8, 9, 10, 11, 12, 13, 14, 15, or more amino acid substitutions. In some embodiments, a substitution set refers to the set of amino acid substitutions that is present in any of the acid alpha-glucosidase polypeptides listed in any of the Tables in the Examples. In these substitution sets, the individual substitutions are separated by a semicolon (e.g., L24W; L28S) or slash (“/”; e.g., L24W/L28S or 24W/28S). In some embodiments, the “substitution” comprises the deletion of an amino acid, and can be denoted by “−” symbol.

[0066] “Conservative amino acid substitution” refers to a substitution of a residue with a different residue having a similar side chain, and thus typically involves substitution of the amino acid in the polypeptide with amino acids within the same or similar defined class of amino acids. By way of example and not limitation, an amino acid with an aliphatic side chain may be substituted with another aliphatic amino acid (e.g., alanine, valine, leucine, and isoleucine); an amino acid with hydroxyl side chain is substituted with another amino acid with a hydroxyl side chain (e.g., serine and threonine); an amino acids having aromatic side chains is substituted with another amino acid having an aromatic side chain (e.g., phenylalanine, tyrosine, tryptophan, and histidine); an amino acid with a basic side chain is substituted with another amino acid with a basis side chain (e.g., lysine and arginine); an amino acid with an acidic side chain is substituted with another amino acid with an acidic side chain (e.g., aspartic acid or glutamic acid); and/or a hydrophobic or hydrophilic amino acid is replaced with another hydrophobic or hydrophilic amino acid, respectively.

[0067] “Non-conservative substitution” refers to substitution of an amino acid in the polypeptide with an amino acid with significantly differing side chain properties. Non-conservative substitutions may use amino acids between, rather than within, the defined groups and affects (a) the structure of the peptide backbone in the area of the substitution (e.g., proline for glycine) (b) the charge or hydrophobicity, or (c) the bulk of the side chain. By way of example and not limitation, an exemplary non-conservative substitution can be an acidic amino acid substituted with a basic or aliphatic amino acid; an aromatic amino acid substituted with a small amino acid; and a hydrophilic amino acid substituted with a hydrophobic amino acid.

[0068] “Deletion” refers to modification to the polypeptide by removal of one or more amino acids from the reference polypeptide. Deletions can comprise removal of 1 or more amino acids, 2 or more amino acids, 5 or more amino acids, 10 or more amino acids, 15 or more amino acids, or 20 or more amino acids, up to 10% of the total number of amino acids, or up to 20% of the total number of amino acids making up the reference polypeptide while retaining activity and/or retaining the improved properties of an engineered polypeptide. Deletions can be directed to the internal portions and/or terminal portions of the polypeptide. In various embodiments, the deletion can comprise a continuous segment or can be discontinuous.

[0069] “Insertion” refers to modification to the polypeptide by addition of one or more amino acids from the reference polypeptide. Insertions can be in the internal portions of the polypeptide, or to the carboxy or amino terminus. Insertions as used herein include fusion proteins as is known in the art. The insertion can be a contiguous segment of amino acids or separated by one or more of the amino acids in the naturally occurring polypeptide.

[0070] “Functional fragment” or a “biologically active fragment” used interchangeably herein refers to a polypeptide that has an amino-terminal and/or carboxy-terminal deletion(s) and/or internal deletions, but where the remaining amino acid sequence is identical to the corresponding positions in the sequence to which it is being compared (e.g., a full-length engineered acid alpha-glucosidase of the present invention) and that retains substantially all of the activity of the full-length polypeptide.

[0071] “Isolated polypeptide” refers to a polypeptide which is substantially separated from other contaminants that naturally accompany it (e.g., protein, lipids, and polynucleotides). The term embraces polypeptides which have been removed or purified from their naturally-occurring environment or expression system (e.g., host cell or in vitro synthesis). The engineered acid alpha-glucosidase polypeptides may be present within a cell, present in the cellular medium, or prepared in various forms, such as lysates or isolated preparations. As such, in some embodiments, the engineered acid alpha-glucosidase polypeptides can be an isolated polypeptide.

[0072] “Substantially pure polypeptide” refers to a composition in which the polypeptide species is the predominant species present (i.e., on a molar or weight basis it is more abundant than any other individual macromolecular species in the composition), and is generally a substantially purified composition when the object species comprises at least about 50 percent of the macromolecular species present by mole or % weight. Generally, a substantially pure polypeptide composition comprises about 60% or more, about 70% or more, about 80% or more, about 90% or more, about 95% or more, and about 98% or more of all macromolecular species by mole or % weight present in the composition. In some embodiments, the object species is purified to essential homogeneity (i.e., contaminant species cannot be detected in the composition by conventional detection methods) wherein the composition consists essentially of a single macromolecular species. Solvent species, small molecules (<500 Daltons), and elemental ion species are not considered macromolecular species. In some embodiments, the isolated polypeptides are substantially pure polypeptide compositions.

[0073] “Improved enzyme property” refers to an engineered acid alpha-glucosidase polypeptide that exhibits an improvement in any enzyme property as compared to a reference acid alpha-glucosidase polypeptide, which can be a wild-type acid alpha-glucosidase polypeptide or another engineered acid alpha-glucosidase polypeptide. Improved properties include but are not limited to such properties as increased protein expression, increased thermoactivity, increased thermostability, increased pH activity, increased stability, increased enzymatic activity, increased specific activity, increased resistance to substrate or end-product inhibition, increased chemical stability, improved solvent stability, increased tolerance to acidic, neutral, or basic pH, increased tolerance to proteolytic activity (i.e., reduced sensitivity to proteolysis), reduced aggregation, increased solubility, reduced immunogenicity, improved post-translational modification (e.g., glycosylation), altered temperature profile, increased lysosomal stability, etc.

[0074] “Increased enzymatic activity” or “enhanced catalytic activity” refers to an improved property of the engineered acid alpha-glucosidase polypeptides, which can be represented by an increase in specific activity (e.g., product produced/time/weight protein) or an increase in percent conversion of the substrate to the product (e.g., percent conversion of starting amount of substrate to product in a specified time period using a specified amount of acid alpha-glucosidase) as compared to the reference acid alpha-glucosidase enzyme. Exemplary methods to determine enzyme activity are provided in the Examples.

[0075] Any property relating to enzyme activity may be affected, including the classical enzyme properties of Kₘ, Vₘₐₓ or k_{cat}, changes of which can lead to increased enzymatic activity. Improvements in enzyme activity can be from about 1.1 fold the enzymatic activity of the corresponding wild-type enzyme, to as much as 2-fold, 5-fold, 10-fold, 20-fold, 25-fold, 50-fold, 75-fold, 100-fold, 150-fold, 200-fold or more enzymatic activity than the naturally occurring acid alpha-glucosidase or another engineered acid alpha-glucosidase from which the acid alpha-glucosidase polypeptides were derived.

[0076] In some embodiments, acid alpha-glucosidase activity can be measured by any suitable method known in the art (e.g., standard assays, such as monitoring changes in spectrophotometric properties of reactants or products). In some embodiments, the amount of product produced can be measured by monitoring fluorescence (Ex. 355 nm, Em. 460 nm) after hydrolysis of a 4-methylumbelliferyl-alpha-D-glucopyranoside (4-MUGlu) molecule, such as provided in the Examples. Comparisons of enzyme activities are made using a defined preparation of enzyme, a defined assay under a set condition, and one or more defined substrates, as further described in detail herein. Generally, when lysates are compared, the numbers of cells and the amount of protein assayed are determined as well as use of identical expression systems and identical host cells to minimize variations in amount of enzyme produced by the host cells and present in the lysates.

[0077] “Improved tolerance to acidic pH” means that an engineered acid alpha-glucosidase according to the invention will have increased stability (e.g., higher retained activity at about pH 4-4.8, after exposure to an acidic pH for a specified period of time, e.g., 1 hour, up to 24 hours) as compared to a reference acid alpha-glucosidase or another enzyme.

[0078] “Improved tolerance to neutral pH” means that an engineered acid alpha-glucosidase according to the invention will have increased stability (higher retained activity at about pH 7, after exposure to a neutral pH for a specified period of time, e.g., 1 hour, and up to 24 hours) as compared to a reference acid alpha-glucosidase or another enzyme.

[0079] “Improved cellular uptake” means that an engineered acid alpha-glucosidase provided herein exhibits increased endocytosis into cells, as compared to a reference acid alpha-glucosidase (including wild-type acid alpha-glucosidase) or another enzyme. In some embodiments, the cells are cultured Pompe patient-derived cells (higher retained intracellular activity after incubation with cultured cells over a specified period of time, as compared to a reference acid alpha-glucosidase or another enzyme). In some additional embodiments, the engineered acid alpha-glucosidase provided herein exhibits greater retained intracellular activity with cultured cells over a specific period of time as compared to a reference acid alpha-glucosidase (including wild-type acid alpha-glucosidase) or another enzyme. In some additional embodiments, the time period is about 4 hours, while in some other embodiments, the time period is less than 4 hours (e.g., 1, 2, or 3 hours), and in some alternative embodiments, the time period is more than 4 hours (e.g., 5, 6, 7, 8, or more hours).

[0080] “Reduced immunogenicity” and “decreased immunogenicity” mean that an engineered acid alpha-glucosidase provided herein induces or is predicted to have a reduced immune response as compared to a wild-type or another reference acid alpha-glucosidase.

[0081] “Physiological pH” as used herein means the pH range generally found in a subject's (e.g., human) blood.

[0082] “Neutral pH” (e.g., used with reference to improved stability to basic pH conditions or increased tolerance to basic pH) means a pH of about 7.

[0083] “Basic pH” (e.g., used with reference to improved stability to basic pH conditions or increased tolerance to basic pH) means a pH >7, e.g., in a pH range of >7 to 11.

[0084] “Acidic pH” (e.g., used with reference to improved stability to acidic pH conditions or increased tolerance to acidic pH) means a pH<7, e.g., in a pH range of about 1.5 to 4.8.

[0085] “Conversion” refers to the enzymatic conversion (or biotransformation) of a substrate(s) to the corresponding product(s). “Percent conversion” refers to the percent of the substrate that is converted to the product within a period of time under specified conditions. Thus, the “enzymatic activity” or “activity” of an acid alpha-glucosidase polypeptide can be expressed as “percent conversion” of the substrate to the product in a specific period of time.

[0086] “Suitable reaction conditions” refers to those conditions in the enzymatic conversion reaction solution (e.g., ranges of enzyme loading, substrate loading, temperature, pH, buffers, co-solvents, etc.) under which an acid alpha-glucosidase polypeptide of the present application is capable of converting a substrate to the desired product compound. Exemplary “suitable reaction conditions” are provided in the present application and illustrated by the Examples. “Loading”, such as in “compound loading” or “enzyme loading” refers to the concentration or amount of a component in a reaction mixture at the start of the reaction. “Substrate” in the context of an enzymatic conversion reaction process refers to the compound or molecule acted on by the acid alpha-glucosidase polypeptide. “Product” in the context of an enzymatic conversion process refers to the compound or molecule resulting from the action of the acid alpha-glucosidase polypeptide on a substrate.

[0087] “Codon optimized” refers to changes in the codons of the polynucleotide encoding a protein to those preferentially used in a particular organism such that the encoded protein is more efficiently expressed in the organism of interest. Although the genetic code is degenerate in that most amino acids are represented by several codons, called “synonyms” or “synonymous” codons, it is well known that codon usage by particular organisms is nonrandom and biased towards particular codon triplets. This codon usage bias may be higher in reference to a given gene, genes of common function or ancestral origin, highly expressed proteins versus low copy number proteins, and the aggregate protein coding regions of an organism's genome. In some embodiments, the polynucleotides encoding the acid alpha-glucosidase enzymes may be codon optimized for optimal production from the host organism selected for expression.

[0088] “Control sequence” refers herein to include all components, which are necessary or advantageous for the expression of a polynucleotide and/or polypeptide of the present application. Each control sequence may be native or foreign to the nucleic acid sequence encoding the polypeptide. Such control sequences include, but are not limited to, a leader, polyadenylation sequence, propeptide sequence, promoter sequence, signal peptide sequence, initiation sequence and transcription terminator. In some embodiments, at a minimum the control sequences include a promoter, and transcriptional and translational stop signals.

[0089] “Operably linked” or “operatively linked” is defined herein as a configuration in which a control sequence is appropriately placed (i.e., in a functional relationship) at a position relative to a polynucleotide of interest such that the control sequence directs or regulates the expression of the polynucleotide, and where appropriate an encoded polypeptide of interest.

[0090] “Promoter sequence” refers to a nucleic acid sequence that is recognized by a host cell for expression of a polynucleotide of interest, such as a coding sequence. The promoter sequence contains transcriptional control sequences, which mediate the expression of a polynucleotide of interest. The promoter may be any nucleic acid sequence which shows transcriptional activity in the host cell of choice including mutant, truncated, and hybrid promoters, and may be obtained from genes encoding extracellular or intracellular polypeptides either homologous or heterologous to the host cell.

[0091] “Vector” refers to a polynucleotide construct for introducing a polynucleotide sequence into a cell. In some embodiments, the vector is an “expression vector” that is operably linked to a suitable control sequence capable of effecting the expression in a suitable host of a polynucleotide of interest, and/or a polypeptide encoded in the polynucleotide. In some embodiments, an expression vector has a promoter sequence operably linked to the polynucleotide sequence (e.g., transgene) to drive expression in a host cell, and in some embodiments, also comprises a transcription terminator sequence.

[0092] “Expression” includes any step involved in the production of the polypeptide including, but not limited to, transcription, post-transcriptional modification, translation, and post-translational modification. In some embodiments, the term also encompasses secretion of the polypeptide from a cell.

[0093] “Culturing” refers to the growing of a population of cells under any suitable conditions (e.g., using a liquid, gel or solid medium).

[0094] “Produces” refers to the production or expression of proteins and/or other compounds by cells. It is intended that the term encompass any step involved in the production of polypeptides including, but not limited to, transcription, post-transcriptional modification, translation, and post-translational modification. In some embodiments, the term also encompasses secretion of the polypeptide from a cell.

[0095] “Heterologous” or “recombinant” refers to the relationship between two or more nucleic acid or protein sequences (e.g., a promoter sequence, signal peptide, terminator sequence, etc.) that are derived from different sources and are not associated in nature.

[0096] “Host cell” and “host strain” refer to suitable hosts for expression vectors comprising polynucleotides provided herein (e.g., the polynucleotides encoding the acid alpha-glucosidase variants).

[0097] In some embodiments, the host cells are prokaryotic or eukaryotic cells that have been transformed or transfected with vectors constructed using recombinant DNA techniques as known in the art.

[0098] “Therapeutic” refers to a compound administered to a subject who shows signs or symptoms of pathology having beneficial or desirable medical effects.

[0099] “Gene therapy vector” refers to a vehicle or carrier suitable for delivery of a polynucleotide to cells for therapeutic effect. In some embodiments, the vector encapsulates a gene (e.g., therapeutic genes) or polynucleotide sequences for delivery to cells or tissues, including but not limited to adenovirus (AV), adeno-associated virus (AAV), lentivirus (LV), and non-viral vectors, such as liposomes. It is not intended that the present invention be limited to any specific gene therapy vector, as any vehicle suitable for a given setting finds use. The gene therapy vector may be designed to deliver genes to a specific species or host, or may find more general applicability.

[0100] “Gene therapy” refers to the delivery of a gene, polydeoxyribonucleotide, or polynucleotide sequence(s) with a gene therapy vector to cells or tissues for the modification of those cells or tissues for the treatment of prevention of a disease. Gene therapy may include replacing a mutated gene that causes disease with a healthy copy of the gene or a functioning variant of the gene, or inactivating, or “knocking out,” a mutated gene that is functioning improperly. In some embodiments, gene therapy is used in the treatment of disease in patients.

[0101] “mRNA therapy” refers to the delivery of an mRNA polyribonucleotide sequence to cells or tissues for the modification of those cells or tissues for the treatment or prevention of a disease. In some embodiments, the mRNA polynucleotide sequences for delivery to cells or tissue, are formulated, for instance, but not limited to, in liposomes. In some embodiments, mRNA therapy is used in the treatment of disease in patients.

[0102] “Cell therapy” refers to the delivery of living cells that have been modified exogenously to patients to provide a missing gene for the treatment or prevention of a disease. The modified cells are then reintroduced into the body.

[0103] “Composition” and “formulation” encompass products comprising at least one engineered acid alpha-glucosidase of the present disclosure, intended for any suitable use (e.g., pharmaceutical compositions, dietary/nutritional supplements, feed, etc.).

[0104] “Pharmaceutical composition” refers to a composition suitable for pharmaceutical use in a mammalian subject (e.g., human) comprising a pharmaceutically effective amount of an engineered acid alpha-glucosidase polypeptide encompassed by the invention and an acceptable carrier or excipient. In some embodiments, the pharmaceutical composition comprises a recombinant polynucleotide encoding an engineered acid alpha-glucosidase, for example, in the form of a gene therapy vector.

[0105] “Pharmaceutically acceptable” means a material that can be administered to a subject without causing any undesirable biological effects or interacting in a deleterious manner with any of the components in which it is contained and that possesses the desired biological activity.

[0106] “Carrier” when used in reference to a pharmaceutical composition means any of the standard pharmaceutical carrier, buffers, and excipients, such as stabilizers, preservatives, and adjuvants.

[0107] “Excipient” refers to any pharmaceutically acceptable additive, carrier, diluent, adjuvant, or other ingredient, other than the active pharmaceutical ingredient (API; e.g., the engineered acid alpha-glucosidase polypeptide or a recombinant polynucleotide encoding the acid alpha-glucosidase).

[0108] Excipients are typically included for formulation and/or administration purposes.

[0109] “Administration” and “administering” a composition mean providing a composition of the present invention to a subject (e.g., to a person suffering from the effects of Pompe disease).

[0110] “Effective amount” means an amount sufficient to produce the desired result. One of general skill in the art may determine what the effective amount by using routine experimentation.

[0111] “Therapeutically effective amount” when used in reference to symptoms of disease/condition refers to the amount and/or concentration of a compound (e.g., engineered acid alpha-glucosidase polypeptide or a recombinant polynucleotide encoding the engineered acid alpha-glucosidase) that ameliorates, attenuates, or eliminates one or more symptom of a disease/condition or prevents or delays the onset of symptom(s). A “therapeutically effective amount” when used in reference to a disease/condition refers to the amount and/or concentration of a composition (e.g., engineered GAA polypeptide or recombinant polynucleotide encoding the engineered acid alpha-glucosidase) that ameliorates, attenuates, or eliminates the disease/condition. In some embodiments, the term is use in reference to the amount of a composition that elicits the biological (e.g., medical) response by a tissue, system, or animal subject that is sought by the researcher, physician, veterinarian, or other clinician.

[0112] “Treating” or “treatment” of a disease, disorder, or syndrome, as used herein, includes (i) preventing the disease, disorder, or syndrome from occurring in a subject, i.e., causing the clinical symptoms of the disease, disorder, or syndrome not to develop in an animal that may be exposed to or predisposed to the disease, disorder, or syndrome but does not yet experience or display symptoms of the disease, disorder, or syndrome; (ii) inhibiting the disease, disorder, or syndrome, i.e., arresting its development; and (iii) relieving the disease, disorder, or syndrome, i.e., causing regression of the disease, disorder, or syndrome. As such, the terms “treating,” “treat” and “treatment” encompass preventative (e.g., prophylactic), as well as palliative treatment. As is known in the art, adjustments for systemic versus localized delivery, age, body weight, general health, sex, diet, time of administration, drug interaction and the severity of the condition may be necessary, and will be ascertainable with routine experimentation by one of ordinary skill in the art.

[0113] “Subject” encompasses mammals such as humans, non-human primates, livestock, companion animals, and laboratory animals (e.g., rodents and lagomorphs). It is intended that the term encompass females as well as males.

[0114] “Patient” means any subject that is being assessed for, treated for, or is experiencing disease.

[0115] “Infant” refers to a child in the period of the first month after birth to approximately one (1) year of age. As used herein, the term “newborn” refers to child in the period from birth to the 28th day of life. The term “premature infant” refers to an infant born after the twentieth completed week of gestation, yet before full term, generally weighing ˜500 to ˜2499 grams at birth. A “very low birth weight infant” is an infant weighing less than 1500 g at birth.

[0116] “Child” refers to a person who has not attained the legal age for consent to treatment or research procedures. In some embodiments, the term refers to a person between the time of birth and adolescence.

[0117] “Adult” refers to a person who has attained legal age for the relevant jurisdiction (e.g., 18 years). In some embodiments, the term refers to any fully grown, mature organism. In some embodiments, the term “young adult” refers to a person less than 18 years of age, but who has reached sexual maturity.

### Engineered GAA Polypeptides

[0118] The present disclosure provides engineered acid alpha-glucosidase polypeptides characterized by improved properties compared to the wild-type acid alpha-glucosidase or a reference engineered acid alpha-glucosidase polypeptide. The engineered acid alpha-glucosidase polypeptides described herein have been engineered to have, among others, improved activity, plasma stability, cellular uptake, stability in lysosomes, and/or acid pH stability. The engineered acid alpha-glucosidase polypeptides find use in therapeutic applications, such as for the treatment of conditions associated with deficiency in acid alpha-glucosidase.

[0119] In one aspect, the present disclosure provides an engineered acid alpha-glucosidase polypeptide, or biologically active fragment thereof, comprising an amino acid sequence having at least 80%, 81%, 82%, 83%, 84%, 85%, 86%, 87%, 88%, 89%, 90%, 91%, 92%, 93%, 94%, 95%, 96%, 97%, 98%, or 99% or more sequence identity to a reference sequence corresponding to residues 20-944 of an even numbered SEQ ID NO. of SEQ ID NOs: 2, 12, and 14-754, or to an even numbered SEQ ID NO. of SEQ ID NOs: 2, 12, and 14-754, wherein the amino acid sequence comprises one or more substitutions relative to the reference sequence corresponding to residues 20-944 of SEQ ID NO: 12 or 2, or relative to the reference sequence corresponding to SEQ ID NO: 12 or 2.

[0120] In some embodiments, the engineered acid alpha-glucosidase, or biologically active fragment thereof, comprises an amino acid sequence having at least 80%, 81%, 82%, 83%, 84%, 85%, 86%, 87%, 88%, 89%, 90%, 91%, 92%, 93%, 94%, 95%, 96%, 97%, 98%, or 99% or more sequence identity to a reference sequence corresponding to residues 20-944 of SEQ ID NO: 12 or 2, or to a reference sequence corresponding to SEQ ID NO: 12 or 2, wherein the amino acid sequence comprises one or more substitutions relative to the reference sequence corresponding to residues 20-944 of SEQ ID NO: 12 or 2, or relative to the reference sequence corresponding to SEQ ID NO: 12 or 2.

[0121] In some embodiments, the engineered acid alpha-glucosidase, or biologically active fragment thereof, comprises an amino acid sequence having at least 80%, 81%, 82%, 83%, 84%, 85%, 86%, 87%, 88%, 89%, 90%, 91%, 92%, 93%, 94%, 95%, 96%, 97%, 98%, or 99% or more sequence identity to the reference sequence corresponding to residues 20-944 of SEQ ID NO: 12, or to the reference sequence corresponding to SEQ ID NO: 12, wherein the amino acid sequence comprises one or more substitutions relative to the reference sequence corresponding to residues 20-944 of SEQ ID NO: 12, or relative to the reference sequence corresponding to SEQ ID NO: 12.

[0122] In some embodiments, the engineered acid alpha-glucosidase, or biologically active fragment thereof, comprises an amino acid sequence having at least 80%, 81%, 82%, 83%, 84%, 85%, 86%, 87%, 88%, 89%, 90%, 91%, 92%, 93%, 94%, 95%, 96%, 97%, 98%, or 99% or more sequence identity to a reference sequence corresponding to residues 20-944 of an even numbered SEQ ID NO. of SEQ ID NOs: 14-754, or to an even numbered SEQ ID NO. of SEQ ID NOs: 14-754, wherein the amino acid sequence comprises one or more substitutions relative to the reference sequence corresponding to residues 20-944 of SEQ ID NO: 12 or 2, or relative to the reference sequence corresponding to SEQ ID NO: 12 or 2.

[0123] In some embodiments, the amino acid sequence of the engineered acid alpha-glucosidase comprises at least a substitution at amino acid position 24, 28, 29, 39, 50, 62, 78, 87, 135, 150, 266, 267, 305, 437, 486, 522, 569, 670, 692, 711, 736, 750, 812, 830, 842, 871, 883, 894, 913, or 932, or combinations thereof, wherein the amino acid positions are relative to the reference sequence corresponding to residues 20-944 of SEQ ID NO: 12 or 2, or relative to the reference sequence corresponding to SEQ ID NO: 12 or 2.

[0124] In some embodiments, the amino acid sequence of the engineered acid alpha-glucosidase comprises at least a substitution or amino acid residue 24A/C/D/E/F/G/H/I/K/L/M/N/P/R/S/T/V/Y, 28A/C/D/E/F/G/H/K/L/P/Q/R/T/V/W, 29A/C/D/E/F/G/H/I/K/L/M/N/P/Q/R/S/V/W/Y, 39A/E/F/G/I/L/N/T, 50A/C/D/E/F/G/H/I/K/L/M/N/Q/R/S/T/W/Y, 62A/D/E/F/G/H/I/K/M/N/P/Q/S/T/V/Y, 78A/C/D/F/G/H/I/K/L/M/N/P/Q/R/S/T/V/W/Y, 87A/D/G/H/I/K/L/MN/Q/R/S/T/V/W, 135A/C/D/E/F/G/H/I/K/L/N/P/R/Y, 150T, 266A/D/E/H/K/Q/T, 267H/L/R/T/V, 305V, 437A/H/S, 486A/C/D/F/G/H/I/K/L/M/N/Q/R/S/T/V/W/Y, 522A/C/D/E/F/G/H/I/K/L/M/N/P/Q/R/S/T/W/Y, 569A/C/D/E/G/H/I/K/L/M/N/P/Q/R/S/V/W/Y, 670A/D/E/F/G/H/I/K/L/M/N/Q/R/S/V/Y, 692A/C/D/E/F/H/I/K/L/M/N/Q/R/S/T/V/W/Y, 711A/C/D/E/F/G/I/K/L/M/N/Q/R/S/T/V/W/Y, 736F/L, 750A/E/K/L/Q/R, 812A/D/G/S, 830D/E/F/G/H/L/M/N/Q/S/T/V/W/Y, 842A/C/D/E/F/G/H/K/L/M/N/Q/R/T/W, 871A/C/D/F/G/H/I/K/L/M/N/Q/R/S/T/V/W/Y, 883A/F/Q, 894A/C/D/E/H/I/K/L/M/N/Q/R/S/T/V/W/Y, 913E/F/H/I/K/M/N/Q/S/W, or 932C/D/E/G/H/K/L/M/N/P/Q/R/S/T/W/Y, or combinations thereof, wherein the amino acid positions are relative to the reference sequence corresponding to residues 20-944 of SEQ ID NO: 12 or 2, or relative to the reference sequence corresponding to SEQ ID NO: 12 or 2.

[0125] In some embodiments, the amino acid sequence of the engineered acid alpha-glucosidase comprises at least a substitution W24E/A/C/D/F/G/H/I/K/L/M/N/P/R/ST/V/Y, S28A/C/D/E/F/G/H/K/L/P/Q/R/T/V/W, T29A/C/D/E/F/G/H/I/K/L/M/N/P/Q/R/S/V/W/Y, Q39A/E/F/G/I/L/N/T, V50A/C/D/E/F/G/H/I/K/L/M/N/Q/R/S/T/W/Y, L62A/D/E/F/G/H/I/K/M/N/P/Q/S/T/V/Y, E78A/C/D/F/G/H/I/K/L/M/N/P/Q/R/S/T/V/W/Y, E87A/D/G/H/IK/L/M/N/Q/R/S/T/V/W, Q135A/C/D/E/F/G/H/I/K/L/N/P/R/Y, S150T, N266A/D/E/H/K/Q/T, K267H/L/R/T/V, G437A/H/S, E486A/C/D/F/G/H/I/K/L/M/N/Q/R/S/T/V/W/Y, V522A/C/D/E/F/G/H/I/K/L/M/N/P/Q/R/S/T/W/Y, T569A/C/D/E/G/H/I/K/L/M/N/P/Q/R/S/V/W/Y, T670A/D/E/F/G/H/I/K/L/M/N/Q/R/S/V/Y, G692A/C/D/E/F/H/I/K/L/M/N/Q/R/S/T/V/W/Y, H711A/C/D/E/F/G/I/K/L/M/N/Q/R/S/T/V/W/Y, M736F/L, P750A/E/K/L/Q/R, E812A/D/G/S, K830D/E/F/G/H/L/M/N/Q/S/T/V/W/Y, S842A/C/D/E/F/G/H/K/L/M/N/Q/R/T/W, E871A/C/D/F/G/H/I/K/L/M/N/Q/R/S/T/V/W/Y, H883A/F/Q, G894A/C/D/E/H/I/K/L/M/N/Q/R/S/T/V/W/Y, R913E/F/H/I/K/M/N/Q/S/W, A932C/D/E/G/H/K/L/M/N/P/Q/R/S/T/W/Y, or combinations thereof, wherein the amino acid positions are relative to the reference sequence corresponding to residues 20-944 of SEQ ID NO: 12 or 2, or relative to the reference sequence corresponding to SEQ ID NO: 12 or 2.

[0126] In some embodiments, the amino acid sequence of the engineered acid alpha-glucosidase comprises at least a substitution or amino acid residue 24A/C/D/F/G/H/I/K/M/N/P/S/T/V/Y, 28A/C/D/E/F/G/H/K/Q/T/V/W, 29A/C/D/E/F/G/H/I/K/M/N/P/R/W/Y, 39A/E/F/G/I/L/N/T, 50A/C/D/E/F/H/II/K/M/N/R/S/T/W/Y, 62D/H/I/K/M/N/P/Q/Y, 78A/C/D/F/G/H/I/K/L/M/N/Q/R/S/T/V/W/Y, 87A/G/H/I/K/L/MN/Q/R/S/T/V/W, 135C/D/E/F/G/H/I/K/L/N/R/Y, 266A/D/E/H/K/Q, 267H/L/T/V, 305V, 437A/H, 486C/D/F/G/H/I/K/L/M/N/Q/R/S/V/W/Y, 522A/C/D/F/G/H/I/K/L/M/N/P/Q/R/S/T/W/Y, 569A/C/D/E/G/K/M/N/P/R/W, 670A/D/G/H/K/M/Y, 692A/D/E/H/K/L/M/N/T/W, 711D/E/I/K/M/N/Q/S/T/V/Y, 736F/L, 750E/K/L/Q/R, 812A/D/G/S, 830D/E/F/G/H/L/M/N/S/T/W/Y, 842A/C/D/F/H/K/L/M/N/Q/R/T/W, 871A/C/D/F/H/I/M/N/Q/T/V/W/Y, 883A/F/Q, 894A/D/E/H/I/K/L/M/N/S/T/V/W/Y, 913F/IK/M/N/S, or 932C/D/E/G/H/K/L/M/N/P/Q/R/W/Y, or combinations thereof, wherein the amino acid positions are relative to the reference sequence corresponding to residues 20-944 of SEQ ID NO: 12, or relative to the reference sequence corresponding to SEQ ID NO: 12.

[0127] In some embodiments, the amino acid sequence of the engineered acid alpha-glucosidase comprises at least a substitution W24A/C/D/F/G/H/I/K/M/N/P/S/T/V/Y, S28A/C/D/E/F/G/H/K/Q/T/V/W, T29A/C/D/E/F/G/H/I/K/M/N/P/R/W/Y, Q39A/E/F/G/I/L/N/T, V50A/C/D/E/F/H/I/K/M/N/R/S/T/W/Y, L62D/H/I/K/M/N/P/Q/Y, E78A/C/D/F/G/H/I/K/L/M/N/Q/R/S/T/V/W/Y, E87A/G/H/I/K/L/MN/Q/R/S/T/V/W, Q135C/D/E/F/G/H/I/K/L/N/R/Y, N266A/D/E/H/K/Q, K267H/L/T/V, L305V, G437A/H, E486C/D/F/G/H/I/K/L/M/N/Q/R/S/V/W/Y, V522A/C/D/F/G/H/I/K/L/M/N/P/Q/R/S/T/W/Y, T569A/C/D/E/G/K/M/N/P/R/W, T670A/D/G/H/K/M/Y, G692A/D/E/H/K/L/M/N/T/W, H711D/E/I/K/M/N/Q/S/T/V/Y, M736F/L, P750E/K/L/Q/R, E812A/D/G/S, K830D/E/F/G/H/L/M/N/S/T/W/Y, S842A/C/D/F/H/K/L/M/N/Q/R/T/W, E871A/C/D/F/H/I/M/N/Q/T/V/W/Y, H883A/F/Q, G894A/D/E/H/IK/L/M/N/S/T/V/W/Y, R913F/I/K/M/N/S, or A932C/D/E/G/H/K/L/M/N/P/Q/R/W/Y, or combinations thereof, wherein the amino acid positions are relative to the reference sequence corresponding to residues 20-944 of SEQ ID NO: 12, or relative to the reference sequence corresponding to SEQ ID NO: 12.

[0128] In some embodiments, the amino acid sequence of the engineered acid alpha-glucosidase comprises at least a substitution at amino acid position 305. In some embodiments, the amino acid sequence of the engineered acid alpha-glucosidase comprises at least a substitution or amino acid residue 305V. In some embodiments, the amino acid sequence of the engineered acid alpha-glucosidase comprises at least a substitution L305V.

[0129] In some embodiments, the amino acid sequence of the engineered acid alpha-glucosidase comprises at least a substitution at amino acid position 24. In some embodiments, the amino acid sequence of the engineered acid alpha-glucosidase comprises at least a substitution or amino acid residue 24A/C/D/F/G/H/I/K/M/N/P/S/T/V/Y. In some embodiments, the amino acid sequence of the engineered acid alpha-glucosidase comprises at least a substitution or amino acid residue 24A/C/D/E/F/G/H/I/K/L/M/N/P/R/ST/V/Y. In some embodiments, the amino acid sequence of the engineered acid alpha-glucosidase comprises at least a substitution W24A/C/D/F/G/H/I/K/M/N/P/S/T/V/Y. In some embodiments, the amino acid sequence of the engineered acid alpha-glucosidase comprises at least a substitution W24E/A/C/D/F/G/H/I/K/L/M/N/P/R/ST/V/Y.

[0130] In some embodiments, the amino acid sequence of the engineered acid alpha-glucosidase comprises at least a substitution at amino acid position 28. In some embodiments, the amino acid sequence of the engineered acid alpha-glucosidase comprises at least a substitution or amino acid residue 28A/C/D/E/F/G/H/K/Q/T/V/W. In some embodiments, the amino acid sequence of the engineered acid alpha-glucosidase comprises at least a substitution or amino acid residue 28A/C/D/E/F/G/H/K/L/P/Q/R/T/V/W. In some embodiments, the amino acid sequence of the engineered acid alpha-glucosidase comprises at least a substitution S28A/C/D/E/F/G/H/K/Q/T/V/W. In some embodiments, the amino acid sequence of the engineered acid alpha-glucosidase comprises at least a substitution S28A/C/D/E/F/G/H/K/L/P/Q/R/T/V/W.

[0131] In some embodiments, the amino acid sequence of the engineered acid alpha-glucosidase comprises at least a substitution at amino acid position 29. In some embodiments, the amino acid sequence of the engineered acid alpha-glucosidase comprises at least a substitution or amino acid residue 29A/C/D/E/F/G/H/I/K/M/N/P/R/W/Y. In some embodiments, the amino acid sequence of the engineered acid alpha-glucosidase comprises at least a substitution or amino acid residue 29A/C/D/E/F/G/H/I/K/L/M/N/P/Q/R/S/V/W/Y. In some embodiments, the amino acid sequence of the engineered acid alpha-glucosidase comprises at least a substitution T29A/C/D/E/F/G/H/I/K/M/N/P/R/W/Y. In some embodiments, the amino acid sequence of the engineered acid alpha-glucosidase comprises at least a substitution T29A/C/D/E/F/G/H/I/K/L/M/N/P/Q/R/S/V/W/Y.

[0132] In some embodiments, the amino acid sequence of the engineered acid alpha-glucosidase comprises at least a substitution at amino acid position 39. In some embodiments, the amino acid sequence of the engineered acid alpha-glucosidase comprises at least a substitution or amino acid residue 39A/E/F/G/I/L/N/T. In some embodiments, the amino acid sequence of the engineered acid alpha-glucosidase comprises at least a substitution Q39A/E/F/G/I/L/N/T.

[0133] In some embodiments, the amino acid sequence of the engineered acid alpha-glucosidase comprises at least a substitution at amino acid position 50. In some embodiments, the amino acid sequence of the engineered acid alpha-glucosidase comprises at least a substitution or amino acid residue 50A/C/D/E/F/H/II/K/M/N/R/S/T/W/Y. In some embodiments, the amino acid sequence of the engineered acid alpha-glucosidase comprises at least a substitution or amino acid residue 50A/C/D/E/F/G/H/I/K/L/M/N/Q/R/S/T/W/Y. In some embodiments, the amino acid sequence of the engineered acid alpha-glucosidase comprises at least a substitution V50A/C/D/E/F/H/I/K/M/N/R/S/T/W/Y. In some embodiments, the amino acid sequence of the engineered acid alpha-glucosidase comprises at least a substitution V50A/C/D/E/F/G/H/I/K/L/M/N/Q/R/S/T/W/Y.

[0134] In some embodiments, the amino acid sequence of the engineered acid alpha-glucosidase comprises at least a substitution at amino acid position 62. In some embodiments, the amino acid sequence of the engineered acid alpha-glucosidase comprises at least a substitution or amino acid residue 62D/H/I/K/M/N/P/Q/Y. In some embodiments, the amino acid sequence of the engineered acid alpha-glucosidase comprises at least a substitution or amino acid residue 62A/D/E/F/G/H/I/K/M/N/P/Q/S/T/V/Y. In some embodiments, the amino acid sequence of the engineered acid alpha-glucosidase comprises at least a substitution L62D/H/I/K/M/N/P/Q/Y. In some embodiments, the amino acid sequence of the engineered acid alpha-glucosidase comprises at least a substitution L62A/D/E/F/G/H/I/K/M/N/P/Q/S/T/V/Y.

[0135] In some embodiments, the amino acid sequence of the engineered acid alpha-glucosidase comprises at least a substitution at amino acid position 78. In some embodiments, the amino acid sequence of the engineered acid alpha-glucosidase comprises at least a substitution or amino acid residue 78A/C/D/F/G/H/I/K/L/M/N/Q/R/S/T/V/W/Y. In some embodiments, the amino acid sequence of the engineered acid alpha-glucosidase comprises at least a substitution or amino acid residue 78A/C/D/F/G/H/I/K/L/M/N/P/Q/R/S/T/V/W/Y. In some embodiments, the amino acid sequence of the engineered acid alpha-glucosidase comprises at least a substitution E78A/C/D/F/G/H/I/K/L/M/N/Q/R/S/T/V/W/Y. In some embodiments, the amino acid sequence of the engineered acid alpha-glucosidase comprises at least a substitution E78A/C/D/F/G/H/I/K/L/M/N/P/Q/R/S/T/V/W/Y.

[0136] In some embodiments, the amino acid sequence of the engineered acid alpha-glucosidase comprises at least a substitution at amino acid position 87. In some embodiments, the amino acid sequence of the engineered acid alpha-glucosidase comprises at least a substitution or amino acid residue 87A/G/H/I/K/L/MN/Q/R/S/T/V/W. In some embodiments, the amino acid sequence of the engineered acid alpha-glucosidase comprises at least a substitution or amino acid residue 87A/D/G/H/I/K/L/M/N/Q/R/S/T/V/W. In some embodiments, the amino acid sequence of the engineered acid alpha-glucosidase comprises at least a substitution E87A/G/H/I/K/L/MN/Q/R/S/T/V/W.

[0137] In some embodiments, the amino acid sequence of the engineered acid alpha-glucosidase comprises at least a substitution E87A/D/G/H/I/K/L/M/N/Q/R/S/T/V/W.

[0138] In some embodiments, the amino acid sequence of the engineered acid alpha-glucosidase comprises at least a substitution at amino acid position 135. In some embodiments, the amino acid sequence of the engineered acid alpha-glucosidase comprises at least a substitution or amino acid residue 135C/D/E/F/G/H/I/K/L/N/R/Y. In some embodiments, the amino acid sequence of the engineered acid alpha-glucosidase comprises at least a substitution or amino acid residue 135A/C/D/E/F/G/H/I/K/L/N/P/R/Y. In some embodiments, the amino acid sequence of the engineered acid alpha-glucosidase comprises at least a substitution Q135C/D/E/F/G/H/I/K/L/N/R/Y. In some embodiments, the amino acid sequence of the engineered acid alpha-glucosidase comprises at least a substitution Q135A/C/D/E/F/G/H/I/K/L/N/P/R/Y.

[0139] In some embodiments, the amino acid sequence of the engineered acid alpha-glucosidase comprises at least a substitution at amino acid position 150. In some embodiments, the amino acid sequence of the engineered acid alpha-glucosidase comprises at least a substitution or amino acid residue 150T. In some embodiments, the amino acid sequence of the engineered acid alpha-glucosidase comprises at least a substitution S150T.

[0140] In some embodiments, the amino acid sequence of the engineered acid alpha-glucosidase comprises at least a substitution at amino acid position 266. In some embodiments, the amino acid sequence of the engineered acid alpha-glucosidase comprises at least a substitution or amino acid residue 266A/D/E/H/K/Q. In some embodiments, the amino acid sequence of the engineered acid alpha-glucosidase comprises at least a substitution or amino acid residue 266A/D/E/H/K/Q/T. In some embodiments, the amino acid sequence of the engineered acid alpha-glucosidase comprises at least a substitution N266A/D/E/H/K/Q. In some embodiments, the amino acid sequence of the engineered acid alpha-glucosidase comprises at least a substitution N266A/D/E/H/K/Q/T.

[0141] In some embodiments, the amino acid sequence of the engineered acid alpha-glucosidase comprises at least a substitution at amino acid position 267. In some embodiments, the amino acid sequence of the engineered acid alpha-glucosidase comprises at least a substitution or amino acid residue 267H/L/T/V. In some embodiments, the amino acid sequence of the engineered acid alpha-glucosidase comprises at least a substitution or amino acid residue 267H/L/R/T/V. In some embodiments, the amino acid sequence of the engineered acid alpha-glucosidase comprises at least a substitution K267H/L/T/V. In some embodiments, the amino acid sequence of the engineered acid alpha-glucosidase comprises at least a substitution K267H/L/R/T/V.

[0142] In some embodiments, the amino acid sequence of the engineered acid alpha-glucosidase comprises at least a substitution at amino acid position 437. In some embodiments, the amino acid sequence of the engineered acid alpha-glucosidase comprises at least a substitution or amino acid residue 437H. In some embodiments, the amino acid sequence of the engineered acid alpha-glucosidase comprises at least a substitution or amino acid residue 437A/H/S. In some embodiments, the amino acid sequence of the engineered acid alpha-glucosidase comprises at least a substitution G437H. In some embodiments, the amino acid sequence of the engineered acid alpha-glucosidase comprises at least a substitution G437A/H/S.

[0143] In some embodiments, the amino acid sequence of the engineered acid alpha-glucosidase comprises at least a substitution at amino acid position 486. In some embodiments, the amino acid sequence of the engineered acid alpha-glucosidase comprises at least a substitution or amino acid residue 486C/D/F/G/H/I/K/L/M/N/Q/R/S/V/W/Y. In some embodiments, the amino acid sequence of the engineered acid alpha-glucosidase comprises at least a substitution or amino acid residue 486A/C/D/F/G/H/I/K/L/M/N/Q/R/S/T/V/W/Y. In some embodiments, the amino acid sequence of the engineered acid alpha-glucosidase comprises at least a substitution E486C/D/F/G/H/I/K/L/M/N/Q/R/S/V/W/Y. In some embodiments, the amino acid sequence of the engineered acid alpha-glucosidase comprises at least a substitution E486A/C/D/F/G/H/I/K/L/M/N/Q/R/S/T/V/W/Y.

[0144] In some embodiments, the amino acid sequence of the engineered acid alpha-glucosidase comprises at least a substitution at amino acid position 522. In some embodiments, the amino acid sequence of the engineered acid alpha-glucosidase comprises at least a substitution or amino acid residue 522A/C/D/F/G/H/I/K/L/M/N/P/Q/R/S/T/W/Y. In some embodiments, the amino acid sequence of the engineered acid alpha-glucosidase comprises at least a substitution or amino acid residue 522A/C/D/E/F/G/H/I/K/L/M/N/P/Q/R/S/T/W/Y. In some embodiments, the amino acid sequence of the engineered acid alpha-glucosidase comprises at least a substitution V522A/C/D/F/G/H/I/K/L/M/N/P/Q/R/S/T/W/Y. In some embodiments, the amino acid sequence of the engineered acid alpha-glucosidase comprises at least a substitution V522A/C/D/E/F/G/H/I/K/L/M/N/P/Q/R/S/T/W/Y.

[0145] In some embodiments, the amino acid sequence of the engineered acid alpha-glucosidase comprises at least a substitution at amino acid position 569. In some embodiments, the amino acid sequence of the engineered acid alpha-glucosidase comprises at least a substitution or amino acid residue 569A/C/D/E/G/K/M/N/P/R/W. In some embodiments, the amino acid sequence of the engineered acid alpha-glucosidase comprises at least a substitution or amino acid residue 569A/C/D/E/G/H/I/K/L/M/N/P/Q/R/S/V/W/Y. In some embodiments, the amino acid sequence of the engineered acid alpha-glucosidase comprises at least a substitution T569A/C/D/E/G/K/M/N/P/R/W. In some embodiments, the amino acid sequence of the engineered acid alpha-glucosidase comprises at least a substitution T569A/C/D/E/G/H/I/K/L/M/N/P/Q/R/S/V/W/Y.

[0146] In some embodiments, the amino acid sequence of the engineered acid alpha-glucosidase comprises at least a substitution at amino acid position 670. In some embodiments, the amino acid sequence of the engineered acid alpha-glucosidase comprises at least a substitution or amino acid residue 670A/D/G/H/K/M/Y. In some embodiments, the amino acid sequence of the engineered acid alpha-glucosidase comprises at least a substitution or amino acid residue 670A/D/E/F/G/H/I/K/L/M/N/Q/R/S/V/Y. In some embodiments, the amino acid sequence of the engineered acid alpha-glucosidase comprises at least a substitution T670A/D/G/H/K/M/Y. In some embodiments, the amino acid sequence of the engineered acid alpha-glucosidase comprises at least a substitution T670A/D/E/F/G/H/I/K/L/M/N/Q/R/S/V/Y.

[0147] In some embodiments, the amino acid sequence of the engineered acid alpha-glucosidase comprises at least a substitution at amino acid position 692. In some embodiments, the amino acid sequence of the engineered acid alpha-glucosidase comprises at least a substitution or amino acid residue 692A/D/E/H/K/L/M/N/T/W. In some embodiments, the amino acid sequence of the engineered acid alpha-glucosidase comprises at least a substitution or amino acid residue 692A/C/D/F/H/I/K/L/M/N/Q/R/S/T/V/W/Y/E. In some embodiments, the amino acid sequence of the engineered acid alpha-glucosidase comprises at least a substitution G692A/D/E/H/K/L/M/N/T/W. In some embodiments, the amino acid sequence of the engineered acid alpha-glucosidase comprises at least a substitution G692A/C/D/E/F/H/I/K/L/M/N/Q/R/S/T/V/W/Y.

[0148] In some embodiments, the amino acid sequence of the engineered acid alpha-glucosidase comprises at least a substitution at amino acid position 711. In some embodiments, the amino acid sequence of the engineered acid alpha-glucosidase comprises at least a substitution or amino acid residue 711D/E/I/K/M/N/Q/S/T/V/Y. In some embodiments, the amino acid sequence of the engineered acid alpha-glucosidase comprises at least a substitution or amino acid residue 711A/C/D/E/F/G/I/K/L/M/N/Q/R/S/T/V/W/Y. In some embodiments, the amino acid sequence of the engineered acid alpha-glucosidase comprises at least a substitution H711D/E/I/K/M/N/Q/S/T/V/Y. In some embodiments, the amino acid sequence of the engineered acid alpha-glucosidase comprises at least a substitution H711A/C/D/E/F/G/I/K/L/M/N/Q/R/S/T/V/W/Y.

[0149] In some embodiments, the amino acid sequence of the engineered acid alpha-glucosidase comprises at least a substitution at amino acid position 736. In some embodiments, the amino acid sequence of the engineered acid alpha-glucosidase comprises at least a substitution or amino acid residue 736F/L. In some embodiments, the amino acid sequence of the engineered acid alpha-glucosidase comprises at least a substitution M736F/L.

[0150] In some embodiments, the amino acid sequence of the engineered acid alpha-glucosidase comprises at least a substitution at amino acid position 750. In some embodiments, the amino acid sequence of the engineered acid alpha-glucosidase comprises at least a substitution or amino acid residue 750E/K/L/Q/R. In some embodiments, the amino acid sequence of the engineered acid alpha-glucosidase comprises at least a substitution or amino acid residue 750A/E/K/L/Q/R. In some embodiments, the amino acid sequence of the engineered acid alpha-glucosidase comprises at least a substitution P750E/K/L/Q/R. In some embodiments, the amino acid sequence of the engineered acid alpha-glucosidase comprises at least a substitution P750A/E/K/L/Q/R.

[0151] In some embodiments, the amino acid sequence of the engineered acid alpha-glucosidase comprises at least a substitution at amino acid position 812. In some embodiments, the amino acid sequence of the engineered acid alpha-glucosidase comprises at least a substitution or amino acid residue 812A/D/G/S. In some embodiments, the amino acid sequence of the engineered acid alpha-glucosidase comprises at least a substitution E812A/D/G/S.

[0152] In some embodiments, the amino acid sequence of the engineered acid alpha-glucosidase comprises at least a substitution at amino acid position 830. In some embodiments, the amino acid sequence of the engineered acid alpha-glucosidase comprises at least a substitution or amino acid residue 830D/E/F/G/H/L/M/N/S/T/W/Y. In some embodiments, the amino acid sequence of the engineered acid alpha-glucosidase comprises at least a substitution or amino acid residue 830D/E/F/G/H/L/M/N/Q/S/T/V/W/Y. In some embodiments, the amino acid sequence of the engineered acid alpha-glucosidase comprises at least a substitution K830D/E/F/G/H/L/M/N/S/T/W/Y. In some embodiments, the amino acid sequence of the engineered acid alpha-glucosidase comprises at least a substitution K830D/E/F/G/H/L/M/N/Q/S/T/V/W/Y.

[0153] In some embodiments, the amino acid sequence of the engineered acid alpha-glucosidase comprises at least a substitution at amino acid position 842. In some embodiments, the amino acid sequence of the engineered acid alpha-glucosidase comprises at least a substitution or amino acid residue 842A/C/D/F/H/K/L/M/N/Q/R/T/W. In some embodiments, the amino acid sequence of the engineered acid alpha-glucosidase comprises at least a substitution or amino acid residue 842A/C/D/E/F/G/H/K/L/M/N/Q/R/T/W. In some embodiments, the amino acid sequence of the engineered acid alpha-glucosidase comprises at least a substitution S842A/C/D/F/H/K/L/M/N/Q/R/T/W.

[0154] In some embodiments, the amino acid sequence of the engineered acid alpha-glucosidase comprises at least a substitution S842A/C/D/E/F/G/H/K/L/M/N/Q/R/T/W.

[0155] In some embodiments, the amino acid sequence of the engineered acid alpha-glucosidase comprises at least a substitution at amino acid position 871. In some embodiments, the amino acid sequence of the engineered acid alpha-glucosidase comprises at least a substitution or amino acid residue 871A/C/D/F/H/I/M/N/Q/T/V/W/Y. In some embodiments, the amino acid sequence of the engineered acid alpha-glucosidase comprises at least a substitution or amino acid residue 871A/C/D/F/G/H/I/K/L/M/N/Q/R/S/T/V/W/Y. In some embodiments, the amino acid sequence of the engineered acid alpha-glucosidase comprises at least a substitution E871A/C/D/F/H/I/M/N/Q/T/V/W/Y.

[0156] In some embodiments, the amino acid sequence of the engineered acid alpha-glucosidase comprises at least a substitution E871A/C/D/F/G/H/I/K/L/M/N/Q/R/S/T/V/W/Y.

[0157] In some embodiments, the amino acid sequence of the engineered acid alpha-glucosidase comprises at least a substitution at amino acid position 883. In some embodiments, the amino acid sequence of the engineered acid alpha-glucosidase comprises at least a substitution or amino acid residue 883A/F/Q. In some embodiments, the amino acid sequence of the engineered acid alpha-glucosidase comprises at least a substitution H883A/F/Q.

[0158] In some embodiments, the amino acid sequence of the engineered acid alpha-glucosidase comprises at least a substitution at amino acid position 894. In some embodiments, the amino acid sequence of the engineered acid alpha-glucosidase comprises at least a substitution or amino acid residue 894A/D/E/H/I/K/L/M/N/S/T/V/W/Y. In some embodiments, the amino acid sequence of the engineered acid alpha-glucosidase comprises at least a substitution or amino acid residue 894A/C/D/E/H/I/K/L/M/N/Q/R/S/T/V/W/Y. In some embodiments, the amino acid sequence of the engineered acid alpha-glucosidase comprises at least a substitution G894A/D/E/H/I/K/L/M/N/S/T/V/W/Y. In some embodiments, the amino acid sequence of the engineered acid alpha-glucosidase comprises at least a substitution G894A/C/D/E/H/I/K/L/M/N/Q/R/S/T/V/W/Y.

[0159] In some embodiments, the amino acid sequence of the engineered acid alpha-glucosidase comprises at least a substitution at amino acid position 913. In some embodiments, the amino acid sequence of the engineered acid alpha-glucosidase comprises at least a substitution or amino acid residue 913F/I/K/M/N/S. In some embodiments, the amino acid sequence of the engineered acid alpha-glucosidase comprises at least a substitution or amino acid residue 913E/F/H/I/K/M/N/Q/S/W. In some embodiments, the amino acid sequence of the engineered acid alpha-glucosidase comprises at least a substitution R913F/I/K/M/N/S. In some embodiments, the amino acid sequence of the engineered acid alpha-glucosidase comprises at least a substitution R913E/F/H/I/K/M/N/Q/S/W.

[0160] In some embodiments, the amino acid sequence of the engineered acid alpha-glucosidase comprises at least a substitution at amino acid position 932. In some embodiments, the amino acid sequence of the engineered acid alpha-glucosidase comprises at least a substitution or amino acid residue 932C/D/E/G/H/K/L/M/N/P/Q/R/W/Y. In some embodiments, the amino acid sequence of the engineered acid alpha-glucosidase comprises at least a substitution or amino acid residue 932C/D/E/G/H/K/L/M/N/P/Q/R/S/T/W/Y. In some embodiments, the amino acid sequence of the engineered acid alpha-glucosidase comprises at least a substitution A932C/D/E/G/H/K/L/M/N/P/Q/R/W/Y. In some embodiments, the amino acid sequence of the engineered acid alpha-glucosidase comprises at least a substitution A932C/D/E/G/H/K/L/M/N/P/Q/R/S/T/W/Y.

[0161] In some embodiments, the engineered acid alpha-glucosidase comprises an amino acid sequence having at least 80%, 81%, 82%, 83%, 84%, 85%, 86%, 87%, 88%, 89%, 90%, 91%, 92%, 93%, 94%, 95%, 96%, 97%, 98%, or 99% or more sequence identity to an engineered acid alpha-glucosidase with a substitution or substitution set as set forth in Table 3-1, wherein the amino acid positions are relative to the reference sequence corresponding to residues 20-944 of SEQ ID NO: 12 or 2, or relative to the reference sequence corresponding to SEQ ID NO: 12 or 2.

[0162] In some embodiments, the amino acid sequence of the engineered acid alpha-glucosidase comprises at least a substitution at an amino acid position as set forth in Table 3-1, wherein the amino acid positions are relative to the reference sequence corresponding to residues 20-944 of SEQ ID NO: 12 or 2, or relative to the reference sequence corresponding to SEQ ID NO: 12 or 2.

[0163] In some embodiments, the amino acid sequence of the engineered acid alpha-glucosidase comprises at least one substitution as set forth in Table 3-1, wherein the amino acid positions are relative to the reference sequence corresponding to residues 20-944 of SEQ ID NO: 12 or 2, or relative to the reference sequence corresponding to SEQ ID NO: 12 or 2.

[0164] In some embodiments, the amino acid sequence of the engineered acid alpha-glucosidase comprises at least a substitution set as set forth in Table 3-1, wherein the amino acid positions are relative to the reference sequence corresponding to residues 20-944 of SEQ ID NO: 2, or relative to the reference sequence corresponding to SEQ ID NO: 2.

[0165] In some embodiments, the amino acid sequence of the engineered acid alpha-glucosidase comprises at least a substitution set at amino acid positions 24/28/29/39/50/62/78/87/135/150/266/267/305/437/486/522/569/670/692/711/736/750/812/830/842/871/883/894/913/932, 24/28/29/39/50/62/78/87/135/150/266/267/437/486/522/569/670/692/711/736/750/812/830/842/871/883/894/913/932, 24/28/29/39/50/62/78/87/135/150/266/267/437/486/522/569/670/692/711/736/750/812/830/871/883/894/913/932, 28/29/39/50/62/78/87/135/150/266/267/437/486/522/569/670/692/711/736/750/812/830/842/871/883/89 4/913/932, 24/28/29/39/50/78/87/135/150/266/267/437/486/522/569/670/692/711/736/750/812/830/842/871/883/89 4/913/932, 24/28/29/39/50/62/78/87/135/150/266/267/437/486/522/569/670/692/711/736/750/812/830/842/883/894/913/932, 24/28/29/39/50/62/78/87/135/150/266/267/437/486/522/670/692/711/736/750/812/830/842/871/883/894/913/932, 24/28/29/39/50/62/78/87/135/150/266/267/437/486/522/569/692/711/736/750/812/830/842/871/883/894/913/932, 24/28/29/39/50/62/78/87/135/150/266/267/437/486/522/569/670/692/736/750/812/830/842/871/883/894/913/932, 24/28/29/39/50/62/78/87/135/150/266/267/437/486/522/569/670/692/711/750/812/830/842/871/883/894/913/932, 24/28/29/39/50/62/78/87/135/150/266/267/437/486/569/670/692/711/736/750/812/830/842/871/883/894/913/932, 24/28/29/39/50/62/78/87/135/150/266/267/437/486/522/569/670/692/711/736/812/830/842/871/883/894/913/932, 24/28/39/50/62/78/87/135/150/266/267/437/486/522/569/670/692/711/736/750/812/830/842/871/883/89 4/913/932, 24/28/29/39/50/62/78/87/135/150/266/437/486/522/569/670/692/711/736/750/812/830/842/871/883/894/913/932, 24/29/39/50/62/78/87/135/150/266/267/437/486/522/569/670/692/711/736/750/812/830/842/871/883/89 4/913/932, 24/28/29/39/50/62/78/135/150/266/267/437/486/522/569/670/692/711/736/750/812/830/842/871/883/89 4/913/932, 24/28/29/39/50/62/78/87/135/150/266/267/486/522/569/670/692/711/736/750/812/830/842/871/883/894/913/932, 24/28/29/39/50/62/87/135/150/266/267/437/486/522/569/670/692/711/736/750/812/830/842/871/883/89 4/913/932, 24/28/29/39/50/62/78/87/135/150/266/267/437/486/522/569/670/692/711/736/750/812/830/8425/871/88 3/894/913/932, 24/28/29/39/50/62/78/87/135/266/267/437/486/522/569/670/692/711/736/750/812/830/842/871/883/894/913/932, 24/28/29/39/50/62/78/87/135/150/266/267/437/486/522/569/670/692/711/736/750/812/842/871/883/894/913/932, 24/28/29/39/50/62/78/87/135/150/266/267/437/486/522/569/670/692/711/736/750/830/842/871/883/894/913/932, 24/28/29/39/62/78/87/135/150/266/267/437/486/522/569/670/692/711/736/750/812/830/842/871/883/89 4/913/932, 24/28/29/39/50/62/78/87/135/150/266/267/437/486/522/569/670/711/736/750/812/830/842/871/883/894/913/932, 24/28/29/39/50/62/78/87/135/150/266/267/437/486/522/569/670/692/711/736/750/812/830/842/871/883/913/932, 24/28/29/39/50/62/78/87/135/150/267/437/486/522/569/670/692/711/736/750/812/830/842/871/883/894/913/932, 24/28/29/39/50/62/78/87/135/150/266/267/437/522/569/670/692/711/736/750/812/830/842/871/883/894/913/932, 24/28/29/39/50/62/78/87/135/150/266/267/437/486/522/569/670/692/711/736/750/812/830/842/871/883/894/913, or 24/28/29/39/50/62/78/87/135/150/266/267/437/486/522/569/670/692/711/736/750/8125/830/842/871/88 3/894/913/932, wherein the amino acid positions are relative to the reference sequence corresponding to residues 20-944 of SEQ ID NO: 2, or relative to the reference sequence corresponding to SEQ ID NO: 2. In some embodiments, the specific amino acid substitutions at the positions in the substitution set are selected from the substitutions described herein for each of the amino acid positions.

[0166] In some embodiments, the amino acid sequence of the engineered acid alpha-glucosidase comprises at least a substitution set 24W/28S/29T/39Q/50V/62L/78E/87E/135Q/150S/266N/267K/305V/437G/486E/522V/569T/670T/692G/711H/736M/750P/812E/830K/842S/871E/883H/894G/913R/932A, 24W/28S/29T/39Q/50V/62L/78E/87E/135P/150S/266N/267K/437G/486E/522V/569T/670T/692G/711H/736M/750P/812E/830K/842S/871E/883H/894G/913R/932A, 24W/28S/29T/39Q/50V/62L/78E/87E/135Q/150S/266N/267K/437G/486Q/522V/569T/670T/692G/711H/736M/750P/812E/830K/842S/871E/883H/894G/913R/932A, 24W/28S/29T/39Q/50V/62L/78E/87E/135Q/150S/266N/267K/437G/486E/522V/569T/670T/692G/711H/736M/750P/812E/830K/842E/871E/883H/894G/913R/932A, 24W/28S/29T/39Q/50V/62L/78G/87E/135Q/150S/266N/267K/437G/486E/522V/569T/670T/692G/711 H/736M/750P/812E/830K/842S/871E/883H/894G/913R/932A, 24W/28S/29T/39Q/50V/62L/78E/87E/135Q/150S/266N/267K/437G/486E/522V/569T/670T/692G/711H/736M/750P/812E/830K/842S/871E/883H/894S/913R/932A, 24W/28S/29A/39Q/50V/62L/78E/87E/135Q/150S/266N/267K/437G/486E/522V/569T/670T/692G/711H/736M/750P/812E/830K/842S/871E/883H/894G/913R/932A, 24W/28S/29T/39Q/50V/62L/78E/87E/135Q/150S/266N/267K/437G/486E/522V/569T/670T/692G/711H/736M/750P/812E/830K/871E/883H/894G/913R/932A, 24W/28S/29T/39Q/50V/62S/78E/87E/135Q/150S/266N/267K/437G/486E/522V/569T/670T/692G/711H/736M/750P/812E/830K/842S/871E/883H/894G/913R/932A, 24W/28S/29T/39Q/50V/62L/78E/87E/135Q/150S/266N/267K/437G/486E/522V/569T/670T/692G/711H/736M/750P/812E/830K/842S/871E/883H/894G/913R/932R, 24W/28A/29T/39Q/50V/62L/78E/87E/135Q/150S/266N/267K/437G/486E/522V/569T/670T/692G/711H/736M/750P/812E/830K/842S/871E/883H/894G/913R/932A, 24W/28S/29T/39Q/50V/62L/78E/87E/135Q/150S/266N/267K/437G/486E/522V/569A/670T/692G/711H/736M/750P/812E/830K/842S/871E/883H/894G/913R/932A, 24W/28S/29T/39Q/50V/62L/78E/87E/135Q/150S/266N/267K/437G/486E/522V/569R/670T/692G/711H/736M/750P/812E/830K/842S/871E/883H/894G/913R/932A, 24W/28S/29T/39Q/50V/62L/78E/87E/135Q/150S/266N/267K/437G/486E/522V/569T/670T/692G/711H/736M/750P/812E/830K/842W/871E/883H/894G/913R/932A, 24W/28S/29C/39Q/50V/62L/78E/87E/135Q/150S/266N/267K/437G/486E/522V/569T/670T/692G/711H/736M/750P/812E/830K/842S/871E/883H/894G/913R/932A, 24W/28S/29T/39Q/50V/62L/78E/87E/135Q/150S/266N/267L/437G/486E/522V/569T/670T/692G/711H/736M/750P/812E/830K/842S/871E/883H/894G/913R/932A, 24W/28S/29T/39Q/50V/62L/78E/87Q/135Q/150S/266N/267K/437G/486E/522V/569T/670T/692G/711H/736M/750P/812E/830K/842S/871E/883H/894G/913R/932A, 24W/28S/29T/39Q/50V/62D/78E/87E/135Q/150S/266N/267K/437G/486E/522V/569T/670T/692G/711H/736M/750P/812E/830K/842S/871E/883H/894G/913R/932A, 24W/28S/29T/39Q/50V/62H/78E/87E/135Q/150S/266N/267K/437G/486E/522V/569T/670T/692G/711H/736M/750P/812E/830K/842S/871E/883H/894G/913R/932A, 24W/28S/29T/39Q/50V/62L/78E/87E/135R/150S/266N/267K/437G/486E/522V/569T/670T/692G/711H/736M/750P/812E/830K/842S/871E/883H/894G/913R/932A, 28S/29T/39Q/50V/62L/78E/87E/135Q/150S/266N/267K/437G/486E/522V/569T/670T/692G/711H/736M/750P/812E/830K/842S/871E/883H/894G/913R/932A, 24W/28S/29T/39Q/50V/62L/78E/87E/135Q/150S/266N/267K/437G/486E/522V/569T/670T/692G/711H/736M/750P/812E/830K/842S/871A/883H/894G/913R/932A, 24W/28S/29T/39Q/50S/62L/78E/87E/135Q/150S/266N/267K/437G/486E/522V/569T/670T/692G/711H/736M/750P/812E/830K/842S/871E/883H/894G/913R/932A, 24W/28S/29T/39Q/50V/78E/87E/135Q/150S/266N/267K/437G/486E/522V/569T/670T/692G/711H/736M/750P/812E/830K/842S/871E/883H/894G/913R/932A, 24W/28S/29T/39Q/50V/62L/78E/87E/135Q/150S/266N/267K/437G/486E/522V/569G/670T/692G/711H/736M/750P/812E/830K/842S/871E/883H/894G/913R/932A, 24W/28S/29T/39Q/50V/62L/78E/87E/135Q/150S/266N/267K/437G/486E/522V/569T/670T/692R/711H/736M/750P/812E/830K/842S/871E/883H/894G/913R/932A, 24W/28S/29T/39Q/50V/62L/78E/87E/135Q/150S/266N/267K/437G/486E/522V/569T/670T/692G/711H/736M/750P/812E/830N/842S/871E/883H/894G/913R/932A, 24W/28S/29T/39Q/50V/62L/78E/87E/135Q/150S/266N/267K/437G/486E/522V/569T/670T/692G/711H/736M/750P/812E/830K/842S/871E/883H/894R/913R/932A, 24W/28S/29T/39Q/50V/62L/78E/87E/135Q/150S/266N/267T/437G/486E/522V/569T/670T/692G/711H/736M/750P/812E/830K/842S/871E/883H/894G/913R/932A, 24E/28S/29T/39Q/50V/62L/78E/87E/135Q/150S/266N/267K/437G/486E/522V/569T/670T/692G/711H/736M/750P/812E/830K/842S/871E/883H/894G/913R/932A, 24W/28S/29T/39Q/50V/62L/78E/87E/135G/150S/266N/267K/437G/486E/522V/569T/670T/692G/711H/736M/750P/812E/830K/842S/871E/883H/894G/913R/932A, 24W/28S/29T/39Q/50V/62L/78E/87E/135Q/150S/266N/267K/437G/486E/522V/569T/670T/692V/711H/736M/750P/812E/830K/842S/871E/883H/894G/913R/932A, 24W/28S/29T/39Q/50V/62L/78E/87R/135Q/150S/266N/267K/437G/486E/522V/569T/670T/692G/711H/736M/750P/812E/830K/842S/871E/883H/894G/913R/932A, 24W/28S/29T/39Q/50V/62L/78E/87E/135Q/150S/266N/267K/437G/486E/522V/569T/670T/692G/711H/736M/750P/812E/830K/842S/871E/883H/894G/913Q/932A, 24W/28S/29T/39Q/50V/62L/78E/87E/135Q/150S/266N/267K/437G/486E/522V/569T/670T/692G/711L/736M/750P/812E/830K/842S/871E/883H/894G/913R/932A, 24W/28S/29T/39Q/50V/62L/78E/87L/135Q/150S/266N/267K/437G/486E/522V/569T/670T/692G/711H/736M/750P/812E/830K/842S/871E/883H/894G/913R/932A, 24W/28S/29T/39Q/50V/62L/78E/87V/135Q/150S/266N/267K/437G/486E/522V/569T/670T/692G/711H/736M/750P/812E/830K/842S/871E/883H/894G/913R/932A, 24W/28S/29T/39Q/50V/62L/78Y/87E/135Q/150S/266N/267K/437G/486E/522V/569T/670T/692G/711H/736M/750P/812E/830K/842S/871E/883H/894G/913R/932A, 24W/28S/29T/39Q/50V/62L/78E/87E/135Q/150S/266N/267K/437G/486E/522V/569C/670T/692G/711H/736M/750P/812E/830K/842S/871E/883H/894G/913R/932A, 24W/28S/29T/39Q/50V/62L/78E/87W/135Q/150S/266N/267K/437G/486E/522V/569T/670T/692G/711H/736M/750P/812E/830K/842S/871E/883H/894G/913R/932A, 24W/28S/29T/39Q/50V/62L/78E/87E/135Q/150S/266N/267K/437G/486E/522V/569T/670A/692G/711H/736M/750P/812E/830K/842S/871E/883H/894G/913R/932A, 24W/28S/29T/39Q/50V/62L/78E/87E/135Q/150S/266N/267K/437G/486E/522V/569Q/670T/692G/711 H/736M/750P/812E/830K/842S/871E/883H/894G/913R/932A, 24W/28S/29T/39Q/50V/62K/78E/87E/135Q/150S/266N/267K/437G/486E/522V/569T/670T/692G/711H/736M/750P/812E/830K/842S/871E/883H/894G/913R/932A, 24W/28S/29T/39Q/50V/62L/78E/87E/135Q/150S/266N/267K/437G/486E/522V/569T/670T/692G/711H/736M/750P/812E/830K/842S/871E/883H/894C/913R/932A, 24W/28S/29T/39Q/50V/62L/78E/87E/135Q/150S/266N/267K/437G/486E/522V/569H/670T/692G/711H/736M/750P/812E/830K/842S/871E/883H/894G/913R/932A, 24W/28S/29T/39Q/50V/62L/78E/87E/135Q/150S/266N/267K/437G/486E/522V/569T/670T/692G/711V/736M/750P/812E/830K/842S/871E/883H/894G/913R/932A, 24W/28S/29T/39Q/50V/62L/78E/87E/135Q/150S/266N/267K/437G/486E/522S/569T/670T/692G/711H/736M/750P/812E/830K/842S/871E/883H/894G/913R/932A, 24F/28S/29T/39Q/50V/62L/78E/87E/135Q/150S/266N/267K/437G/486E/522V/569T/670T/692G/711H/736M/750P/812E/830K/842S/871E/883H/894G/913R/932A, 24W/28S/29T/39Q/50V/62L/78E/87E/135Q/150S/266N/267K/437G/486E/522V/569M/670T/692G/711H/736M/750P/812E/830K/842S/871E/883H/894G/913R/932A, 24W/28S/29T/39Q/50V/62L/78E/87E/135Q/150S/266N/267K/437G/486E/522V/569T/670T/692G/711S/736M/750P/812E/830K/842S/871E/883H/894G/913R/932A, 24Y/28S/29T/39Q/50V/62L/78E/87E/135Q/150S/266N/267K/437G/486E/522V/569T/670T/692G/711H/736M/750P/812E/830K/842S/871E/883H/894G/913R/932A, 24W/28S/29T/39Q/50V/62L/78E/87G/135Q/150S/266N/267K/437G/486E/522V/569T/670T/692G/711H/736M/750P/812E/830K/842S/871E/883H/894G/913R/932A, 24W/28S/29T/39Q/50V/62L/78I/87E/135Q/150S/266N/267K/437G/486E/522V/569T/670T/692G/711H/736M/750P/812E/830K/842S/871E/883H/894G/913R/932A, 24W/28S/29T/39Q/50V/62L/78E/87E/135Q/150S/266N/267K/437G/486E/522V/569T/670T/692G/711H/736M/750P/812E/830K/842S/883H/894G/913R/932A, 24W/28S/29T/39Q/50V/62L/78R/87E/135Q/150S/266N/267K/437G/486E/522V/569T/670T/692G/711H/736M/750P/812E/830K/842S/871E/883H/894G/913R/932A, 24W/28S/29T/39Q/50V/62L/78E/87E/135Q/150S/266N/267K/437G/486E/522V/670T/692G/711H/736M/750P/812E/830K/842S/871E/883H/894G/913R/932A, 24C/28S/29T/39Q/50V/62L/78E/87E/135Q/150S/266N/267K/437G/486E/522V/569T/670T/692G/711H/736M/750P/812E/830K/842S/871E/883H/894G/913R/932A, 24W/28S/29T/39Q/50V/62L/78E/87E/135Q/150S/266N/267K/437G/486E/522V/569T/692G/711H1736M/750P/812E/830K/842S/871E/883H/894G/913R/932A, 24W/28S/29T/39Q/50V/62L/78W/87E/135Q/150S/266N/267K/437G/486E/522V/569T/670T/692G/711H/736M/750P/812E/830K/842S/871E/883H/894G/913R/932A, 24W/28S/29T/39Q/50V/62L/78E/87E/135Q/150S/266N/267K/437G/486E/522F/569T/670T/692G/711H/736M/750P/812E/830K/842S/871E/883H/894G/913R/932A, 24W/28S/29T/39Q/50V/62L/78E/87E/135Q/150S/266N/267K/437G/486E/522P/569T/670T/692G/711H/736M/750P/812E/830K/842S/871E/883H/894G/913R/932A, 24W/28S/29T/39Q/50V/62L/78E/87E/135Q/150S/266N/267K/437G/486E/522V/569T/670T/692G/711H/736M/750P/812E/830V/842S/871E/883H/894G/913R/932A, 24W/28S/29T/39Q/50V/62L/78E/87E/135Q/150S/266N/267K/437G/486E/522V/569T/670T/692G/711M/736M/750P/812E/830K/842S/871E/883H/894G/913R/932A, 24W/28T/29T/39Q/50V/62L/78E/87E/135Q/150S/266N/267K/437G/486E/522V/569T/670T/692G/711H/736M/750P/812E/830K/842S/871E/883H/894G/913R/932A, 24W/28S/29T/39Q/50V/62L/78E/87E/135Q/150S/266N/267K/437G/486E/522V/569K/670T/692G/711H/736M/750P/812E/830K/842S/871E/883H/894G/913R/932A, 24S/28S/29T/39Q/50V/62L/78E/87E/135Q/150S/266N/267K/437G/486E/522V/569T/670T/692G/711H/736M/750P/812E/830K/842S/871E/883H/894G/913R/932A, 24W/28S/29T/39Q/50V/62L/78E/87E/135L/150S/266N/267K/437G/486E/522V/569T/670T/692G/711H/736M/750P/812E/830K/842S/871E/883H/894G/913R/932A, 24W/28S/29T/39Q/50V/62L/78E/87E/135Q/150S/266N/267K/437G/486E/522V/569T/670T/692G/711H/736M/750P/812E/830K/842R/871E/883H/894G/913R/932A, 24W/28S/29T/39Q/50V/62L/78E/87E/135Q/150S/266N/267K/437G/486E/522V/569T/670T/692G/711H/736M/750P/812E/830K/842S/871E/883H/894Y/913R/932A, 24W/28S/29T/39Q/50V/62L/78E/87E/135Q/150S/266N/267K/437G/486E/522V/569T/670T/692G/711H/736M/750P/812E/830K/842T/871E/883H/894G/913R/932A, 24W/28S/29T/39Q/50V/62L/78E/87E/135Q/150S/266N/267K/437G/486E/522V/569T/670T/692G/711H/736M/750P/812E/830K/842S/871E/883H/894T/913R/932A, 24W/28Q/29T/39Q/50V/62L/78E/87E/135Q/150S/266N/267K/437G/486E/522V/569T/670T/692G/711H/736M/750P/812E/830K/842S/871E/883H/894G/913R/932A, 24W/28S/29T/39Q/50V/62L/78E/87E/135Q/150S/266N/267K/437G/486E/522V/569T/670T/692G/736M/750P/812E/830K/842S/871E/883H/894G/913R/932A, 24W/28S/29T/39Q/50V/62L/78E/87E/135Q/150S/266H/267K/437G/486E/522V/569T/670T/692G/711H/736M/750P/812E/830K/842S/871E/883H/894G/913R/932A, 24W/28S/29T/39Q/50V/62P/78E/87E/135Q/150S/266N/267K/437G/486E/522V/569T/670T/692G/711H/736M/750P/812E/830K/842S/871E/883H/894G/913R/932A, 24W/28S/29T/39L/50V/62L/78E/87E/135Q/150S/266N/267K/437G/486E/522V/569T/670T/692G/711H/736M/750P/812E/830K/842S/871E/883H/894G/913R/932A, 24W/28S/29T/39Q/50V/62L/78E/87E/135Q/150S/266N/267K/437G/486D/522V/569T/670T/692G/711H/736M/750P/812E/830K/842S/871E/883H/894G/913R/932A, 24W/28S/29T/39Q/50V/62L/78E/87E/135Q/150S/266N/267K/437G/486E/522V/569T/670T/692G/711G/736M/750P/812E/830K/842S/871E/883H/894G/913R/932A, 24N/28S/29T/39Q/50V/62L/78E/87E/135Q/150S/266N/267K/437G/486E/522V/569T/670T/692G/711H/736M/750P/812E/830K/842S/871E/883H/894G/913R/932A, 24W/28S/29T/39Q/50V/62L/78E/87E/135Q/150S/266N/267K/437G/486E/522V/569T/670T/692G/711 W/736M/750P/812E/830K/842S/871E/883H/894G/913R/932A, 24W/28S/29T/39Q/50V/62L/78E/87E/135Q/150S/266N/267K/437G/486E/522V/569T/670T/692G/711H/736M/750P/812E/830K/842S/871R/883H/894G/913R/932A, 24W/28S/29T/39Q/50V/62L/78E/87E/135Q/150S/266N/267K/437G/486E/522V/569T/670T/692G/711H/750P/812E/830K/842S/871E/883H/894G/913R/932A, 24W/28S/29T/39Q/50V/62L/78E/87E/135Q/150S/266N/267K/437G/486E/522W/569T/670T/692G/711H/736M/750P/812E/830K/842S/871E/883H/894G/913R/932A, 24W/28S/29T/39Q/50V/62L/78E/87E/135Q/150S/266N/267K/437G/486E/522V/569T/670T/692G/711H/736M/750P/812E/830K/842S/871E/883H/894L/913R/932A, 24W/28S/29T/39Q/50V/62L/78E/87E/135Q/150S/266N/267K/437G/486E/522V/569T/670T/692G/711H/736M/750P/812E/830K/842S/871E/883A/894G/913R/932A, 24W/28S/29T/39Q/50V/62L/78E/87E/135Q/150S/266N/267K/437G/486E/522G/569T/670T/692G/711H/736M/750P/812E/830K/842S/871E/883H/894G/913R/932A, 24W/28S/29T/39Q/50V/62L/78E/87E/135Q/150S/266N/267K/437G/486E/522L/569T/670T/692G/711H/736M/750P/812E/830K/842S/871E/883H/894G/913R/932A, 24W/28S/29T/39Q/50V/62L/78E/87E/135Q/150S/266N/267K/437G/486E/522V/569T/670V/692G/711H/736M/750P/812E/830K/842S/871E/883H/894G/913R/932A, 24W/28S/29T/39Q/50V/62G/78E/87E/135Q/150S/266N/267K/437G/486E/522V/569T/670T/692G/711H/736M/750P/812E/830K/842S/871E/883H/894G/913R/932A, 24W/28S/29T/39Q/50V/62L/78E/87E/135Q/150S/266N/267K/437G/486E/522V/569T/670T/692N/711H/736M/750P/812E/830K/842S/871E/883H/894G/913R/932A, 24W/28S/29T/39Q/50V/62L/78E/87E/135Q/150S/266N/267K/437G/486E/522V/569V/670T/692G/711H/736M/750P/812E/830K/842S/871E/883H/894G/913R/932A, 24W/28S/29T/39Q/50V/62L/78E/87E/135Q/150S/266N/267K/437G/486E/522V/569T/670I/692G/711H/736M/750P/812E/830K/842S/871E/883H/894G/913R/932A, 24W/28S/29T/39Q/50V/62L/78E/87A/135Q/150S/266N/267K/437G/486E/522V/569T/670T/692G/711H/736M/750P/812E/830K/842S/871E/883H/894G/913R/932A, 24W/28S/29T/39Q/50V/62L/78E/87E/135Q/150S/266N/267K/437G/486E/522V/569T/670T/692G/711H/736M/750P/812E/830K/842S/871E/883H/894A/913R/932A, 24W/28S/29T/39Q/50V/62L/78E/87E/135Q/150S/266A/267K/437G/486E/522V/569T/670T/692G/711H/736M/750P/812E/830K/842S/871E/883H/894G/913R/932A, 24W/28S/29T/39Q/50V/62L/78E/87E/135Q/150S/266N/267K/437G/486E/569T/670T/692G/711H/736M/750P/812E/830K/842S/871E/883H/894G/913R/932A, 24W/28R/29T/39Q/50V/62L/78E/87E/135Q/150S/266N/267K/437G/486E/522V/569T/670T/692G/711H/736M/750P/812E/830K/842S/871E/883H/894G/913R/932A, 24W/28S/29T/39Q/50V/62L/78E/87E/135Q/150S/266N/267K/437G/486E/522V/569T/670T/692G/711H/736M/750P/812E/830K/842S/871G/883H/894G/913R/932A, 24W/28S/29T/39Q/50V/62L/78E/87E/135Q/150S/266N/267K/437G/486E/522I/569T/670T/692G/711H/736M/750P/812E/830K/842S/871E/883H/894G/913R/932A, 24W/28S/29T/39Q/50V/62L/78E/87E/135Q/150S/266N/267K/437G/486E/522V/569T/670T/692G/711Y/736M/750P/812E/830K/842S/871E/883H/894G/913R/932A, 24W/28S/29T/39Q/50E/62L/78E/87E/135Q/150S/266N/267K/437G/486E/522V/569T/670T/692G/711H/736M/750P/812E/830K/842S/871E/883H/894G/913R/932A, 24W/28S/29T/39Q/50V/62V/78E/87E/135Q/150S/266N/267K/437G/486E/522V/569T/670T/692G/711H/736M/750P/812E/830K/842S/871E/883H/894G/913R/932A, 24W/28S/29T/39Q/50V/62L/78E/87S/135Q/150S/266N/267K/437G/486E/522V/569T/670T/692G/711H/736M/750P/812E/830K/842S/871E/883H/894G/913R/932A, 24W/28S/29T/39Q/50V/62N/78E/87E/135Q/150S/266N/267K/437G/486E/522V/569T/670T/692G/711H/736M/750P/812E/830K/842S/871E/883H/894G/913R/932A, 24W/28S/29T/39Q/50V/62L/78E/87H/135Q/150S/266N/267K/437G/486E/522V/569T/670T/692G/711H/736M/750P/812E/830K/842S/871E/883H/894G/913R/932A, 24W/28S/29T/39Q/50V/62L/78E/87E/135Q/150S/266N/267K/437G/486L/522V/569T/670T/692G/711H/736M/750P/812E/830K/842S/871E/883H/894G/913R/932A, 24W/28S/29T/39Q/50V/62L/78E/87E/135Q/150S/266N/267K/437G/486E/522V/569T/670T/692G/711H/736M/750P/812E/830K/842S/871E/883H/894G/913E/932A, 24W/28S/29T/39Q/50V/62L/78E/87E/135Q/150S/266N/267K/437G/486E/522V/569T/670T/692G/711R/736M/750P/812E/830K/842S/871E/883H/894G/913R/932A, 24W/28S/29T/39G/50V/62L/78E/87E/135Q/150S/266N/267K/437G/486E/522V/569T/670T/692G/711H/736M/750P/812E/830K/842S/871E/883H/894G/913R/932A, 24R/28S/29T/39Q/50V/62L/78E/87E/135Q/150S/266N/267K/437G/486E/522V/569T/670T/692G/711H/736M/750P/812E/830K/842S/871E/883H/894G/913R/932A, 24W/28S/29T/39Q/50V/62L/78E/87E/135Q/150S/266D/267K/437G/486E/522V/569T/670T/692G/711H/736M/750P/812E/830K/842S/871E/883H/894G/913R/932A, 24W/28S/29T/39T/50V/62L/78E/87E/135Q/150S/266N/267K/437G/486E/522V/569T/670T/692G/711H/736M/750P/812E/830K/842S/871E/883H/894G/913R/932A, 24W/28S/29T/39Q/50C/62L/78E/87E/135Q/150S/266N/267K/437G/486E/522V/569T/670T/692G/711H/736M/750P/812E/830K/842S/871E/883H/894G/913R/932A, 24A/28S/29T/39Q/50V/62L/78E/87E/135Q/150S/266N/267K/437G/486E/522V/569T/670T/692G/711H/736M/750P/812E/830K/842S/871E/883H/894G/913R/932A, 24W/28S/29T/39Q/50V/62L/78E/87K/135Q/150S/266N/267K/437G/486E/522V/569T/670T/692G/711H/736M/750P/812E/830K/842S/871E/883H/894G/913R/932A, 24W/28S/29T/39Q/50V/62L/78E/87E/135Q/150S/266N/267K/437G/486E/522V/569T/670T/692G/711H/736M/812E/830K/842S/871E/883H/894G/913R/932A, 24W/28S/29E/39Q/50V/62L/78E/87E/135Q/150S/266N/267K/437G/486E/522V/569T/670T/692G/711H/736M/750P/812E/830K/842S/871E/883H/894G/913R/932A, 24W/28S/29T/39Q/50V/62L/78L/87E/135Q/150S/266N/267K/437G/486E/522V/569T/670T/692G/711H/736M/750P/812E/830K/842S/871E/883H/894G/913R/932A, 24P/28S/29T/39Q/50V/62L/78E/87E/135Q/150S/266N/267K/437G/486E/522V/569T/670T/692G/711H/736M/750P/812E/830K/842S/871E/883H/894G/913R/932A, 24D/28S/29T/39Q/50V/62L/78E/87E/135Q/150S/266N/267K/437G/486E/522V/569T/670T/692G/711H/736M/750P/812E/830K/842S/871E/883H/894G/913R/932A, 24W/28S/29T/39Q/50V/62L/78E/87E/135Q/150S/266N/267K/437G/486E/522V/569T/670T/692K/711H/736M/750P/812E/830K/842S/871E/883H/894G/913R/932A, 24W/28S/29D/39Q/50V/62L/78E/87E/135Q/150S/266N/267K/437G/486E/522V/569T/670T/692G/711H/736M/750P/812E/830K/842S/871E/883H/894G/913R/932A, 24W/28S/29T/39Q/50Y/62L/78E/87E/135Q/150S/266N/267K/437G/486E/522V/569T/670T/692G/711H/736M/750P/812E/830K/842S/871E/883H/894G/913R/932A, 24W/28S/29T/39Q/50V/62L/78E/87E/135Q/150S/266N/267K/437G/486K/522V/569T/670T/692G/711H/736M/750P/812E/830K/842S/871E/883H/894G/913R/932A, 24W/28F/29T/39Q/50V/62L/78E/87E/135Q/150S/266N/267K/437G/486E/522V/569T/670T/692G/711H/736M/750P/812E/830K/842S/871E/883H/894G/913R/932A, 24W/28S/29T/39Q/50V/62L/78E/87E/135Q/150S/266N/267K/437G/486E/522V/569S/670T/692G/711H/736M/750P/812E/830K/842S/871E/883H/894G/913R/932A, 24W/28S/29T/39Q/50V/62L/78E/87E/135Q/150S/266N/267K/437G/486E/522V/569T/670T/692G/711H/736M/750P/812E/830K/842S/871E/883Q/894G/913R/932A, 24W/28S/29T/39Q/50F/62L/78E/87E/135Q/150S/266N/267K/437G/486E/522V/569T/670T/692G/711H/736M/750P/812E/830K/842S/871E/883H/894G/913R/932A, 24W/28W/29T/39Q/50V/62L/78E/87E/135Q/150S/266N/267K/437G/486E/522V/569T/670T/692G/711H/736M/750P/812E/830K/842S/871E/883H/894G/913R/932A, 24W/28S/29T/39Q/50V/62L/78E/87E/135Q/150S/266N/267V/437G/486E/522V/569T/670T/692G/711H/736M/750P/812E/830K/842S/871E/883H/894G/913R/932A, 24W/28S/29T/39Q/50V/62L/78E/87E/135Q/150S/266N/267K/437G/486E/522V/569T/670T/692G/711H/736M/750P/812E/830E/842S/871E/883H/894G/913R/932A, 24W/28S/29T/39Q/50V/62E/78E/87E/135Q/150S/266N/267K/437G/486E/522V/569T/670T/692G/711H/736M/750P/812E/830K/842S/871E/883H/894G/913R/932A, 24W/28S/29T/39Q/50V/62L/78E/87E/135Q/150S/266N/267K/437G/486E/522V/569I/670T/692G/711H/736M/750P/812E/830K/842S/871E/883H/894G/913R/932A, 24W/28V/29T/39Q/50V/62L/78E/87E/135Q/150S/266N/267K/437G/486E/522V/569T/670T/692G/711H/736M/750P/812E/830K/842S/871E/883H/894G/913R/932A, 24W/28S/29T/39Q/50V/62L/78E/87E/135Q/150S/266N/267K/437G/486V/522V/569T/670T/692G/711H/736M/750P/812E/830K/842S/871E/883H/894G/913R/932A, 24W/28S/29T/39Q/50V/62L/78E/87E/135Q/150S/266N/267K/437G/486E/522V/569T/670T/692G/711H/736M/750P/812E/830K/842S/871V/883H/894G/913R/932A, 24W/28S/29S/39Q/50V/62L/78E/87E/135Q/150S/266N/267K/437G/486E/522V/569T/670T/692G/711H/736M/750P/812E/830K/842S/871E/883H/894G/913R/932A, 24W/28C/29T/39Q/50V/62L/78E/87E/135Q/150S/266N/267K/437G/486E/522V/569T/670T/692G/711H/736M/750P/812E/830K/842S/871E/883H/894G/913R/932A, 24W/28S/29T/39Q/50V/62L/78E/87E/135Q/150S/266N/267K/437G/486E/522V/569T/670T/692G/711H/736M/750P/812E/830L/842S/871E/883H/894G/913R/932A, 24W/28K/29T/39Q/50V/62L/78E/87E/135Q/150S/266N/267K/437G/486E/522V/569T/670T/692G/711H/736M/750P/812E/830K/842S/871E/883H/894G/913R/932A, 24W/28S/29T/39Q/50V/62L/78E/87E/135Q/150S/266N/267K/437G/486E/522V/569T/670T/692G/711H/736M/750P/812E/830K/842S/871N/883H/894G/913R/932A, 24W/28S/29T/39Q/50L/62L/78E/87E/135Q/150S/266N/267K/437G/486E/522V/569T/670T/692G/711H/736M/750P/812E/830K/842S/871E/883H/894G/913R/932A, 24W/28S/29T/39Q/50V/62L/78E/87E/135Q/150S/266N/267K/437G/486E/522V/569T/670T/692G/711H/736M/750P/812E/830K/842S/871E/883H/894G/913R/932Q, 24W/28S/39Q/50V/62L/78E/87E/135Q/150S/266N/267K/437G/486E/522V/569T/670T/692G/711H/736M/750P/812E/830K/842S/871E/883H/894G/913R/932A, 24W/28S/29T/39Q/50V/62L/78E/87E/135Q/150S/266N/267K/437G/486E/522V/569T/670T/692G/711F/736M/750P/812E/830K/842S/871E/883H/894G/913R/932A, 24W/28S/29T/39Q/50V/62L/78E/87E/135Q/150S/266N/267K/437G/486E/522V/569E/670T/692G/711H/736M/750P/812E/830K/842S/871E/883H/894G/913R/932A, 24W/28S/29T/39Q/50V/62L/78F/87E/135Q/150S/266N/267K/437G/486E/522V/569T/670T/692G/711H/736M/750P/812E/830K/842S/871E/883H/894G/913R/932A, 24W/28S/29T/39Q/50V/62L/78E/87E/135Q/150S/266N/267K/437G/486E/522R/569T/670T/692G/711H/736M/750P/812E/830K/842S/871E/883H/894G/913R/932A, 24W/28S/29T/39Q/50V/62L/78E/87E/135Q/150S/266N/267K/437G/486E/522V/569T/670T/692G/711E/736M/750P/812E/830K/842S/871E/883H/894G/913R/932A, 24W/28S/29T/39Q/50V/62L/78E/87E/135Q/150S/266N/267K/437G/486E/522V/569T/670T/692G/711H/736M/750P/812E/830K/842F/871E/883H/894G/913R/932A, 24W/28S/29T/39Q/50N/62L/78E/87E/135Q/150S/266N/267K/437G/486E/522V/569T/670T/692G/711H/736M/750P/812E/830K/842S/871E/883H/894G/913R/932A, 24W/28S/29T/39Q/50V/62L/78E/87E/135D/150S/266N/267K/437G/486E/522V/569T/670T/692G/711H/736M/750P/812E/830K/842S/871E/883H/894G/913R/932A, 24W/28S/29T/39Q/50V/62L/78E/87E/135Q/150S/266N/437G/486E/522V/569T/670T/692G/711H/736 M/750P/812E/830K/842S/871E/883H/894G/913R/932A, 24W/28S/29T/39Q/50V/62L/78S/87E/135Q/150S/266N/267K/437G/486E/522V/569T/670T/692G/711H/736M/750P/812E/830K/842S/871E/883H/894G/913R/932A, 24V/28S/29T/39Q/50V/62L/78E/87E/135Q/150S/266N/267K/437G/486E/522V/569T/670T/692G/711H/736M/750P/812E/830K/842S/871E/883H/894G/913R/932A, 24W/28S/29T/39Q/50V/62L/78E/87E/135Q/150S/266N/267K/437G/486E/522V/569T/670T/692G/711H/736M/750P/812E/830K/842S/871E/883H/894G/913S/932A, 24W/28S/29T/39Q/50V/62L/78M/87E/135Q/150S/266N/267K/437G/486E/522V/569T/670T/692G/711H/736M/750P/812E/830K/842S/871E/883H/894G/913R/932A, 24W/28S/29T/39Q/50R/62L/78E/87E/135Q/150S/266N/267K/437G/486E/522V/569T/670T/692G/711H/736M/750P/812E/830K/842S/871E/883H/894G/913R/932A, 24W/28S/29T/39Q/50V/62L/78E/87E/135Q/150S/266N/267K/437G/486E/522V/569T/670Q/692G/711H/736M/750P/812E/830K/842S/871E/883H/894G/913R/932A, 24W/28S/29T/39Q/50V/62T/78E/87E/135Q/150S/266N/267K/437G/486E/522V/569T/670T/692G/711H/736M/750P/812E/830K/842S/871E/883H/894G/913R/932A, 24W/28S/29T/39Q/50V/62L/78E/87E/135Q/150S/266N/267K/437G/486E/522V/569T/670T/692G/711H/736M/750P/812E/830K/842S/871E/883H/894M/913R/932A, 24W/28S/29T/39Q/50K/62L/78E/87E/135Q/150S/266N/267K/437G/486E/522V/569T/670T/692G/711H/736M/750P/812E/830K/842S/871E/883H/894G/913R/932A, 24W/28S/29T/39Q/50V/62L/78N/87E/135Q/150S/266N/267K/437G/486E/522V/569T/670T/692G/711H/736M/750P/812E/830K/842S/871E/883H/894G/913R/932A, 24W/28S/29T/39Q/50V/62L/78E/87E/135Q/150S/266N/267K/437G/486E/522V/569T/670T/692G/711H/736M/750L/812E/830K/842S/871E/883H/894G/913R/932A, 24W/28S/29T/39Q/50V/62L/78E/87E/135Q/150S/266N/267K/437G/486E/522V/569T/670T/692G/711H/736M/750R/812E/830K/842S/871E/883H/894G/913R/932A, 24W/28S/29T/39Q/50V/62L/78E/87E/135Q/150S/266N/267K/437G/486E/522V/569D/670T/692G/711H/736M/750P/812E/830K/842S/871E/883H/894G/913R/932A, 24I/28S/29T/39Q/50V/62L/78E/87E/135Q/150S/266N/267K/437G/486E/522V/569T/670T/692G/711H/736M/750P/812E/830K/842S/871E/883H/894G/913R/932A, 24W/28S/29T/39Q/50V/62L/78E/87E/135Q/150S/266N/267K/437G/486N/522V/569T/670T/692G/711H/736M/750P/812E/830K/842S/871E/883H/894G/913R/932A, 24W/28S/29T/39Q/50V/62L/78E/87E/135Q/150S/266N/267K/437G/486E/522V/569T/670T/692G/711H/736M/750P/812E/830K/842S/871E/883H/894V/913R/932A, 24W/28S/29T/39Q/50V/62L/78E/87E/135Q/150S/266N/267K/437G/486E/522V/569T/670T/692G/711H/736M/750P/812E/830D/842S/871E/883H/894G/913R/932A, 24W/28S/29T/39Q/50V/62L/78E/87E/135Q/150S/266N/267K/437G/486E/522V/569T/670T/692G/711H/736M/750P/812E/830K/842S/871E/883H/894W/913R/932A, 24W/28S/29T/39Q/50V/62L/78V/87E/135Q/150S/266N/267K/437G/486E/522V/569T/670T/692G/711H/736M/750P/812E/830K/842S/871E/883H/894G/913R/932A, 24W/28S/29T/39Q/50V/62L/78E/87E/135Q/150S/266N/267K/437G/486E/522A/569T/670T/692G/711H/736M/750P/812E/830K/842S/871E/883H/894G/913R/932A, 24W/28S/29T/39Q/50V/62L/78E/87E/135Q/150S/266N/267K/437G/486E/522V/569T/670M/692G/711H/736M/750P/812E/830K/842S/871E/883H/894G/913R/932A, 24W/28S/29T/39Q/50V/62Y/78E/87E/135Q/150S/266N/267K/437G/486E/522V/569T/670T/692G/711H/736M/750P/812E/830K/842S/871E/883H/894G/913R/932A, 24W/29T/39Q/50V/62L/78E/87E/135Q/150S/266N/267K/437G/486E/522V/569T/670T/692G/711H/736M/750P/812E/830K/842S/871E/883H/894G/913R/932A, 24W/28S/29T/39Q/50V/62L/78E/87E/135Q/150S/266N/267K/437G/486E/522V/569T/670T/692G/711H/736M/750K/812E/830K/842S/871E/883H/894G/913R/932A, 24W/28S/29T/39Q/50V/62L/78A/87E/135Q/150S/266N/267K/437G/486E/522V/569T/670T/692G/711H/736M/750P/812E/830K/842S/871E/883H/894G/913R/932A, 24W/28S/29T/39Q/50G/62L/78E/87E/135Q/150S/266N/267K/437G/486E/522V/569T/670T/692G/711H/736M/750P/812E/830K/842S/871E/883H/894G/913R/932A, 24W/28S/29T/39Q/50V/62L/78E/87E/135Q/150S/266N/267K/437G/486E/522V/569T/670T/692G/711H/736M/750P/812E/830K/842S/871E/883H/894K/913R/932A, 24W/28S/29T/39Q/50V/62L/78E/87E/135Q/150S/266N/267K/437S/486E/522V/569T/670T/692G/711H/736M/750P/812E/830K/842S/871E/883H/894G/913R/932A, 24W/28S/29T/39Q/50V/62L/78E/87E/135Q/150S/266N/267K/437G/486E/522V/569T/670T/692E/711H/736M/750P/812E/830K/842S/871E/883H/894G/913R/932A, 24W/28S/29T/39Q/50V/62L/78E/87E/135Q/150S/266N/267K/437G/486E/522V/569P/670T/692G/711H/736M/750P/812E/830K/842S/871E/883H/894G/913R/932A, 24W/28S/29T/39Q/50V/62L/78E/87E/135Q/150S/266N/267K/437G/486E/522V/569N/670T/692G/711H/736M/750P/812E/830K/842S/871E/883H/894G/913R/932A, 24W/28S/29T/39Q/50V/62L/78E/135Q/150S/266N/267K/437G/486E/522V/569T/670T/692G/711H/736M/750P/812E/830K/842S/871E/883H/894G/913R/932A, 24W/28S/29T/39Q/50V/62L/78E/87E/135N/150S/266N/267K/437G/486E/522V/569T/670T/692G/711H/736M/750P/812E/830K/842S/871E/883H/894G/913R/932A, 24W/28S/29T/39Q/50V/62L/78E/87E/135Q/150S/266N/267K/437G/486E/522Y/569T/670T/692G/711H/736M/750P/812E/830K/842S/871E/883H/894G/913R/932A, 24W/28S/29T/39Q/50V/62L/78E/87E/135Q/150S/266N/267K/486E/522V/569T/670T/692G/711H/736M/750P/812E/830K/842S/871E/883H/894G/913R/932A, 24W/28S/29T/39Q/50V/62L/78E/87E/135Q/150S/266N/267K/437G/486E/522V/569T/670T/692G/711H/736F/750P/812E/830K/842S/871E/883H/894G/913R/932A, 24W/28S/29T/39Q/50V/62L/78E/87E/135Q/150S/266N/267K/437G/486E/522V/569T/670T/692G/711H/736M/750P/812E/830K/842S/871E/883H/894G/913R/932T, 24G/28S/29T/39Q/50V/62L/78E/87E/135Q/150S/266N/267K/437G/486E/522V/569T/670T/692G/711H/736M/750P/812E/830K/842S/871E/883H/894G/913R/932A, 24W/28S/29T/39Q/50V/62L/78E/87E/135Q/150S/266N/267K/437G/486E/522V/569T/670T/692G/711H/736M/750P/812E/830K/842K/871E/883H/894G/913R/932A, 24W/28S/29T/39Q/50V/62L/78E/87E/135Q/150S/266N/267K/437G/486E/522V/569T/670T/692G/711H/736M/750P/812E/830K/842S/871E/883H/894G/913R/932W, 24W/28S/29T/39Q/50V/62L/78E/87E/135Q/150S/266N/267K/437G/486E/522V/569T/670T/692Q/711H/736M/750P/812E/830K/842S/871E/883H/894G/913R/932A, 24W/28S/29T/39Q/50V/62L/78E/87E/135F/150S/266N/267K/437G/486E/522V/569T/670T/692G/711H/736M/750P/812E/830K/842S/871E/883H/894G/913R/932A, 24W/28S/29T/39Q/50V/62L/87E/135Q/150S/266N/267K/437G/486E/522V/569T/670T/692G/711H/736M/750P/812E/830K/842S/871E/883H/894G/913R/932A, 24W/28S/29T/39Q/50V/62L/78E/87E/135Q/150S/266N/267K/437G/486E/522V/569T/670T/692G/711H/736M/750P/812E/830K/842S/871F/883H/894G/913R/932A, 24W/28S/29T/39Q/50V/62L/78E/87E/135Q/150S/266N/267K/437G/486E/522V/569T/670Y/692G/711H/736M/750P/812E/830K/842S/871E/883H/894G/913R/932A, 24W/28S/29T/39Q/50V/62L/78E/87E/135Q/150S/266N/267K/437G/486E/522V/569T/670T/692L/711H/736M/750P/812E/830K/842S/871E/883H/894G/913R/932A, 24W/28S/29T/39Q/50V/62L/78E/87E/135E/150S/266N/267K/437G/486E/522V/569T/670T/692G/711H/736M/750P/812E/830K/842S/871E/883H/894G/913R/932A, 24W/28S/29T/39Q/50V/62L/78E/87E/135Q/150S/266N/267K/437G/486E/522V/569T/670F/692G/711H/736M/750P/812E/830K/842S/871E/883H/894G/913R/932A, 24W/28S/29T/39Q/50H/62L/78E/87E/135Q/150S/266N/267K/437G/486E/522V/569T/670T/692G/711H/736M/750P/812E/830K/842S/871E/883H/894G/913R/932A, 24W/28S/29T/39Q/50V/62L/78E/87I/135Q/150S/266N/267K/437G/486E/522V/569T/670T/692G/711H/736M/750P/812E/830K/842S/871E/883H/894G/913R/932A, 24W/28P/29T/39Q/50V/62L/78E/87E/135Q/150S/266N/267K/437G/486E/522V/569T/670T/692G/711H/736M/750P/812E/830K/842S/871E/883H/894G/913R/932A, 24W/28S/29T/39Q/50V/62L/78E/87E/135Q/150S/266N/267K/437G/486E/522V/569T/670T/692G/711H/736M/750P/812E/830K/842S/871E/883F/894G/913R/932A, 24W/28S/29T/39Q/50V/62L/78E/87E/135Q/150S/266N/267K/437H/486E/522V/569T/670T/692G/711H/736M/750P/812E/830K/842S/871E/883H/894G/913R/932A, 24W/28S/29T/39Q/50V/62I/78E/87E/135Q/150S/266N/267K/437G/486E/522V/569T/670T/692G/711H/736M/750P/812E/830K/842S/871E/883H/894G/913R/932A, 24W/28S/29T/39Q/50V/62L/78E/87E/135Q/150S/266N/267K/437G/486E/522V/569T/670T/692G/711H/736M/750P/812E/830W/842S/871E/883H/894G/913R/932A, 24W/28S/29T/39Q/50V/62L/78E/87E/135Q/150S/266N/267K/437G/486E/522V/569T/670T/692S/711H/736M/750P/812E/830K/842S/871E/883H/894G/913R/932A, 24W/28S/29K/39Q/50V/62L/78E/87E/135Q/150S/266N/267K/437G/486E/522V/569T/670T/692G/711H/736M/750P/812E/830K/842S/871E/883H/894G/913R/932A, 24W/28S/29T/39Q/50V/62L/78E/87E/135Q/150S/266N/267K/437G/486E/522V/569T/670E/692G/711H/736M/750P/812E/830K/842S/871E/883H/894G/913R/932A, 24W/28S/29T/39Q/50V/62L/78E/87E/135Q/150S/266N/267K/437G/486R/522V/569T/670T/692G/711H/736M/750P/812E/830K/842S/871E/883H/894G/913R/932A, 24W/28S/29T/39Q/50V/62L/78E/87E/135A/150S/266N/267K/437G/486E/522V/569T/670T/692G/711H/736M/750P/812E/830K/842S/871E/883H/894G/913R/932A, 24W/28S/29T/39I/50V/62L/78E/87E/135Q/150S/266N/267K/437G/486E/522V/569T/670T/692G/711H/736M/750P/812E/830K/842S/871E/883H/894G/913R/932A, 24W/28S/29T/39Q/50V/62L/78E/87N/135Q/150S/266N/267K/437G/486E/522V/569T/670T/692G/711H/736M/750P/812E/830K/842S/871E/883H/894G/913R/932A, 24W/28S/29T/39Q/50V/62L/78E/87M/135Q/150S/266N/267K/437G/486E/522V/569T/670T/692G/711H/736M/750P/812E/830K/842S/871E/883H/894G/913R/932A, 24W/28S/29T/39Q/50V/62L/78E/87E/135C/150S/266N/267K/437G/486E/522V/569T/670T/692G/711H/736M/750P/812E/830K/842S/871E/883H/894G/913R/932A, 24W/28S/29T/39Q/50V/62L/78E/87E/135Q/150S/266N/267K/437G/486E/522V/569T/670T/692G/711H/736M/750P/812E/830K/842S/871E/883H/894G/913R/932L, 24W/28S/29T/39Q/50V/62L/78E/87E/135Q/150S/266N/267K/437G/486E/522V/569T/670G/692G/711H/736M/750P/812E/830K/842S/871E/883H/894G/913R/932A, 24W/28S/29T/39Q/50V/62L/78E/87E/135Q/150S/266N/267K/437G/486E/522V/569T/670T/692G/711H/736M/750P/812E/830F/842S/871E/883H/894G/913R/932A, 24W/28S/29T/39Q/50V/62L/78E/87E/135Q/150S/266N/267K/437G/486E/522H/569T/670T/692G/711H/736M/750P/812E/830K/842S/871E/883H/894G/913R/932A, 24W/28D/29T/39Q/50V/62L/78E/87E/135Q/150S/266N/267K/437G/486E/522V/569T/670T/692G/711H/736M/750P/812E/830K/842S/871E/883H/894G/913R/932A, 24W/28S/29T/39Q/50V/62L/78E/87E/135Q/150S/266N/267K/437G/486E/522Q/569T/670T/692G/711H/736M/750P/812E/830K/842S/871E/883H/894G/913R/932A, 24W/28S/29T/39Q/50A/62L/78E/87E/135Q/150S/266N/267K/437G/486E/522V/569T/670T/692G/711H/736M/750P/812E/830K/842S/871E/883H/894G/913R/932A, 24W/28S/29T/39Q/50V/62L/78E/87E/135Q/150S/266N/267K/437G/486E/522V/569T/670S/692G/711H/736M/750P/812E/830K/842S/871E/883H/894G/913R/932A, 24W/28S/29T/39Q/50V/62L/78E/87E/135Q/150S/266N/267K/437G/486E/522V/569T/670T/692G/711H/736M/750P/812E/830M/842S/871E/883H/894G/913R/932A, 24W/28S/29T/39Q/50V/62L/78E/87E/135Q/150S/266N/267K/437G/486E/522V/569T/670T/692G/711H/736M/750P/812E/830K/842A/871E/883H/894G/913R/932A, 24W/28S/29T/39Q/50V/62L/78E/87T/135Q/150S/266N/267K/437G/486E/522V/569T/670T/692G/711H/736M/750P/812E/830K/842S/871E/883H/894G/913R/932A, 24W/28S/29T/39Q/50V/62L/78E/87E/135Q/150S/266N/267K/437G/486E/522T/569T/670T/692G/711H/736M/750P/812E/830K/842S/871E/883H/894G/913R/932A, 24K/28S/29T/39Q/50V/62L/78E/87E/135Q/150S/266N/267K/437G/486E/522V/569T/670T/692G/711H/736M/750P/812E/830K/842S/871E/883H/894G/913R/932A, 24W/28S/29T/39Q/50V/62L/78E/87E/135Q/150S/266N/267K/437G/486E/522V/569T/670T/692G/711H/736M/750P/812E/830K/842S/871K/883H/894G/913R/932A, 24W/28S/29T/39Q/50V/62L/78E/87E/135Q/150S/266N/267K/437G/486E/522V/569T/670T/692G/711H/736M/750E/812E/830K/842S/871E/883H/894G/913R/932A, 24W/28S/29T/39Q/50V/62L/78E/87E/135Q/150S/266N/267K/437G/486E/522V/569T/670T/692G/711H/736M/750P/812E/830T/842S/871E/883H/894G/913R/932A, 24W/28S/29T/39Q/50I/62L/78E/87E/135Q/150S/266N/267K/437G/486E/522V/569T/670T/692G/711H/736M/750P/812E/830K/842S/871E/883H/894G/913R/932A, 24W/28S/29T/39Q/50V/62L/78E/87E/135Q/150S/266N/267K/437G/486E/522V/569T/670T/692G/711H/736M/750P/812E/830K/842S/871E/883H/894G/913R/932E, 24W/28S/29T/39Q/50V/62L/78E/87E/135Q/150S/266Q/267K/437G/486E/522V/569T/670T/692G/711H/736M/750P/812E/830K/842S/871E/883H/894G/913R/932A, 24W/28S/29T/39A/50V/62L/78E/87E/135Q/150S/266N/267K/437G/486E/522V/569T/670T/692G/711H/736M/750P/812E/830K/842S/871E/883H/894G/913R/932A, 24T/28S/29T/39Q/50V/62L/78E/87E/135Q/150S/266N/267K/437G/486E/522V/569T/670T/692G/711H/736M/750P/812E/830K/842S/871E/883H/894G/913R/932A, 24W/28S/29T/39Q/50V/62L/78E/87E/135Q/150S/266N/267K/437G/486E/522V/569T/670T/692G/711H/736M/750P/812E/830K/842S/871T/883H/894G/913R/932A, 24W/28S/29T/39Q/50V/62L/78E/87E/135Q/150S/266N/267K/437G/486E/522V/569T/670T/692G/711H/736M/750P/812E/830K/842M/871E/883H/894G/913R/932A, 24W/28S/29T/39Q/50V/62L/78E/87E/135Q/150S/266N/267K/437G/486E/522V/569T/670T/692G/711T/736M/750P/812E/830K/842S/871E/883H/894G/913R/932A, 24W/28S/29T/39Q/50V/62L/78E/87E/135Q/150S/266K/267K/437G/486E/522V/569T/670T/692G/711H/736M/750P/812E/830K/842S/871E/883H/894G/913R/932A, 24W/28S/29T/39Q/50V/62L/78E/87E/135Q/150S/266N/267K/437G/486F/522V/569T/670T/692G/711H/736M/750P/812E/830K/842S/871E/883H/894G/913R/932A, 24W/28S/29T/39Q/50M/62L/78E/87E/135Q/150S/266N/267K/437G/486E/522V/569T/670T/692G/711H/736M/750P/812E/830K/842S/871E/883H/894G/913R/932A, 24W/28S/29T/39Q/50V/62L/78E/87E/135Q/150S/266N/267K/437G/486Y/522V/569T/670T/692G/711H/736M/750P/812E/830K/842S/871E/883H/894G/913R/932A, 24W/28S/29T/39Q/50V/62L/78E/87E/135Q/150S/266N/267K/437G/486E/522V/569T/670R/692G/711H/736M/750P/812E/830K/842S/871E/883H/894G/913R/932A, 24M/28S/29T/39Q/50V/62L/78E/87E/135Q/150S/266N/267K/437G/486E/522V/569T/670T/692G/711H/736M/750P/812E/830K/842S/871E/883H/894G/913R/932A, 24W/28S/29T/39Q/50V/62F/78E/87E/135Q/150S/266N/267K/437G/486E/522V/569T/670T/692G/711H/736M/750P/812E/830K/842S/871E/883H/894G/913R/932A, 24W/28S/29T/39Q/50V/62L/78E/87E/135Q/150S/266N/267K/437G/486E/522V/569Y/670T/692G/711H/736M/750P/812E/830K/842S/871E/883H/894G/913R/932A, 24W/28S/29T/39Q/50V/62L/78E/87E/135Q/150S/266N/267K/437G/486E/522V/569T/670T/692G/711Q/736M/750P/812E/830K/842S/871E/883H/894G/913R/932A, 24W/28S/29T/39Q/50V/62L/78E/87E/135Q/150S/266N/267K/437G/486I/522V/569T/670T/692G/711H/736M/750P/812E/830K/842S/871E/883H/894G/913R/932A, 24W/28S/29T/39Q/50V/62L/78E/87E/135H/150S/266N/267K/437G/486E/522V/569T/670T/692G/711H/736M/750P/812E/830K/842S/871E/883H/894G/913R/932A, 24W/28S/29T/39Q/50V/62L/78E/87E/135Q/150S/266N/267K/437G/486E/522V/569T/670H/692G/711H/736M/750P/812E/830K/842S/871E/883H/894G/913R/932A, 24W/28S/29T/39Q/50V/62L/78E/87E/135Q/150S/266N/267K/437G/486E/522N/569T/670T/692G/711H/736M/750P/812E/830K/842S/871E/883H/894G/913R/932A, 24W/28S/29T/39Q/50V/62L/78E/87E/135Q/150S/266N/267K/437G/486E/522V/569T/670T/692G/711H/736M/750P/812E/830K/842S/871E/883H/894E/913R/932A, 24W/28S/29T/39Q/50V/62L/78E/87E/135Q/150S/266N/267K/437G/486E/522V/569T/670T/692G/711H/736M/750P/812E/830K/842S/871Q/883H/894G/913R/932A, 24W/28E/29T/39Q/50V/62L/78E/87E/135Q/150S/266N/267K/437G/486E/522V/569T/670T/692G/711H/736M/750P/812E/830K/842S/871E/883H/894G/913R/932A, 24W/28S/29T/39Q/50V/62L/78E/87E/135Q/150S/266N/267K/437G/486E/522V/569T/670T/692G/711H/736M/750P/812E/830K/842N/871E/883H/894G/913R/932A, 24W/28S/29T/39Q/50V/62L/78H/87E/135Q/150S/266N/267K/437G/486E/522V/569T/670T/692G/711H/736M/750P/812E/830K/842S/871E/883H/894G/913R/932A, 24W/28S/29T/39Q/50V/62L/78E/87E/135Q/266N/267K/437G/486E/522V/569T/670T/692G/711H/736M/750P/812E/830K/842S/871E/883H/894G/913R/932A, 24W/28S/29T/39Q/50V/62L/78E/87E/135Q/150S/266N/267K/437G/486E/522V/569T/670T/692G/711H/736M/750P/812E/842S/871E/883H/894G/913R/932A, 24W/28S/29T/39Q/50V/62L/78E/87E/135Q/150S/266N/267K/437G/486E/522V/569T/670T/692G/711H/736M/750P/812E/830K/842S/871E/883H/894G/913I/932A, 24W/28S/29T/39Q/50V/62L/78E/87E/135Q/150S/266N/267K/437G/486E/522V/569T/670T/692G/711H/736M/750P/812E/830K/842S/871E/883H/894G/913H/932A, 24W/28S/29T/39Q/50V/62L/78E/87E/135Q/150S/266N/267K/437G/486E/522V/569T/670T/692G/711H/736M/750P/812E/830K/842S/871Y/883H/894G/913R/932A, 24W/28S/29N/39Q/50V/62L/78E/87E/135Q/150S/266N/267K/437G/486E/522V/569T/670T/692G/711H/736M/750P/812E/830K/842S/871E/883H/894G/913R/932A, 24W/28S/29T/39Q/50V/62L/78E/87E/135Q/150S/266N/267K/437G/486E/522V/569T/670K/692G/711H/736M/750P/812E/830K/842S/871E/883H/894G/913R/932A, 24W/28S/29T/39Q/50V/62L/78E/87E/135Q/150S/266N/267K/437G/486E/522V/569T/670T/692A/711H/736M/750P/812E/830K/842S/871E/883H/894G/913R/932A, 24W/28S/29T/39Q/50T/62L/78E/87E/135Q/150S/266N/267K/437G/486E/522V/569T/670T/692G/711H/736M/750P/812E/830K/842S/871E/883H/894G/913R/932A, 24W/28S/29T/39Q/50V/62L/78E/87E/135Q/150S/266N/267K/437G/486E/522V/569T/670T/692G/711H/736M/750P/812E/830K/842H/871E/883H/894G/913R/932A, 24W/28S/29T/39Q/50V/62L/78E/87E/135Q/150S/266N/267K/437G/486E/522V/569T/670T/692M/711H/736M/750P/812E/830K/842S/871E/883H/894G/913R/932A, 24W/28S/29Q/39Q/50V/62L/78E/87E/135Q/150S/266N/267K/437G/486E/522V/569T/670T/692G/711H/736M/750P/812E/830K/842S/871E/883H/894G/913R/932A, 24W/28S/29T/39Q/50V/62L/78E/87E/135Q/150S/266N/267K/437G/486E/522V/569T/670T/692G/711H/736M/750P/812E/830K/842S/871E/883H/894D/913R/932A, 24W/28S/29T/39Q/50V/62L/78E/87E/135Q/150S/266N/267K/437G/486E/522V/569T/670T/692G/711H/736M/750P/812E/830K/842S/871E/883H/894G/913F/932A, 24W/28S/29T/39Q/50V/62L/78E/87E/135Q/150S/266N/267K/437G/486E/522V/569T/670D/692G/711H/736M/750P/812E/830K/842S/871E/883H/894G/913R/932A, 24W/28S/29T/39Q/50V/62M/78E/87E/135Q/150S/266N/267K/437G/486E/522V/569T/670T/692G/711H/736M/750P/812E/830K/842S/871E/883H/894G/913R/932A, 24W/28S/29T/39Q/50V/62L/78E/87E/135Q/150S/266N/267K/437G/486C/522V/569T/670T/692G/711H/736M/750P/812E/830K/842S/871E/883H/894G/913R/932A, 24W/28S/29T/39Q/50V/62L/78T/87E/135Q/150S/266N/267K/437G/486E/522V/569T/670T/692G/711H/736M/750P/812E/830K/842S/871E/883H/894G/913R/932A, 24W/28S/29T/39Q/50V/62L/78E/87E/135Q/150S/266N/267K/437G/486E/522V/569T/670T/692G/711H/736M/750P/830K/842S/871E/883H/894G/913R/932A, 24W/28S/29T/39Q/50V/62L/78E/87E/135Q/150S/266N/267H/437G/486E/522V/569T/670T/692G/711H/736M/750P/812E/830K/842S/871E/883H/894G/913R/932A, 24W/28S/29I/39Q/50V/62L/78E/87E/135Q/150S/266N/267K/437G/486E/522V/569T/670T/692G/711H/736M/750P/812E/830K/842S/871E/883H/894G/913R/932A, 24H/28S/29T/39Q/50V/62L/78E/87E/135Q/150S/266N/267K/437G/486E/522V/569T/670T/692G/711H/736M/750P/812E/830K/842S/871E/883H/894G/913R/932A, 24W/28S/29T/39Q/50V/62L/78E/87E/1351/150S/266N/267K/437G/486E/522V/569T/670T/692G/711H/736M/750P/812E/830K/842S/871E/883H/894G/913R/932A, 24W/28S/29T/39Q/50V/62L/78E/87E/135Q/150S/266N/267K/437G/486E/522V/569T/670T/692H/711H/736M/750P/812E/830K/842S/871E/883H/894G/913R/932A, 24W/28H/29T/39Q/50V/62L/78E/87E/135Q/150S/266N/267K/437G/486E/522V/569T/670T/692G/711H/736M/750P/812E/830K/842S/871E/883H/894G/913R/932A, 24W/28S/29T/39Q/50V/62L/78E/87E/135Q/150S/266N/267K/437G/486E/522V/569T/670T/692G/711H/736M/750P/812E/830K/842S/871E/883H/894G/913N/932A, 24W/28S/29T/39Q/50V/62L/78E/87E/135Q/150S/266N/267K/437G/486E/522V/569T/670T/692G/711H/736M/750P/812E/830K/842D/871E/883H/894G/913R/932A, 24W/28S/29T/39Q/50V/62L/78E/87E/135Q/150S/266N/267K/437G/486E/522K/569T/670T/692G/711H/736M/750P/812E/830K/842S/871E/883H/894G/913R/932A, 24W/28S/29T/39Q/50V/62L/78E/87E/135Q/150S/266N/267K/437G/486E/522V/569T/670T/692G/711H/736M/750P/812E/830K/842S/871E/883H/894H/913R/932A, 24W/28S/29T/39Q/50V/62L/78K/87E/135Q/150S/266N/267K/437G/486E/522V/569T/670T/692G/711H/736M/750P/812E/830K/842S/871E/883H/894G/913R/932A, 24W/28S/29T/39F/50V/62L/78E/87E/135Q/150S/266N/267K/437G/486E/522V/569T/670T/692G/711H/736M/750P/812E/830K/842S/871E/883H/894G/913R/932A, 24W/28S/29T/39Q/50V/62L/78E/87E/135Q/150S/266N/267K/437G/486E/522V/569T/670T/692G/711H/736M/750P/812E/830K/842S/871W/883H/894G/913R/932A, 24W/28S/29T/39Q/50V/62L/78E/87E/135Y/150S/266N/267K/437G/486E/522V/569T/670T/692G/711H/736M/750P/812E/830K/842S/871E/883H/894G/913R/932A, 24W/28S/29T/39Q/50V/62L/78E/87E/135Q/150S/266N/267K/437G/486E/522V/569T/670T/692G/711H/736M/750P/812E/830K/842Q/871E/883H/894G/913R/932A, 24W/28S/29H/39Q/50V/62L/78E/87E/135Q/150S/266N/267K/437G/486E/522V/569T/670T/692G/711H/736M/750P/812E/830K/842S/871E/883H/894G/913R/932A, 24W/28S/29T/39Q/50V/62L/78Q/87E/135Q/150S/266N/267K/437G/486E/522V/569T/670T/692G/711H/736M/750P/812E/830K/842S/871E/883H/894G/913R/932A, 24W/28S/29T/39Q/50V/62L/78E/87E/135Q/150S/266N/267K/437G/486E/522D/569T/670T/692G/711H/736M/750P/812E/830K/842S/871E/883H/894G/913R/932A, 24W/28S/29T/39Q/50V/62L/78E/87E/135Q/150S/266N/267K/437G/486E/522V/569T/670T/692G/711H/736M/750P/812E/830K/842S/871E/883H/894G/913R/932Y, 24W/28S/29V/39Q/50V/62L/78E/87E/135Q/150S/266N/267K/437G/486E/522V/569T/670T/692G/711H/736M/750P/812E/830K/842S/871E/883H/894G/913R/932A, 24W/28S/29T/39Q/62L/78E/87E/135Q/150S/266N/267K/437G/486E/522V/569T/670T/692G/711H/736M/750P/812E/830K/842S/871E/883H/894G/913R/932A, 24W/28S/29T/39Q/50V/62L/78E/87E/135Q/150S/266N/267K/437G/486E/522V/569T/670T/692G/711H/736M/750P/812E/830K/842L/871E/883H/894G/913R/932A, 24W/28S/29T/39Q/50V/62L/78E/87E/135Q/150S/266N/267K/437G/486E/522V/569T/670T/692F/711H/736M/750P/812E/830K/842S/871E/883H/894G/913R/932A, 24W/28S/29R/39Q/50V/62L/78E/87E/135Q/150S/266N/267K/437G/486E/522V/569T/670T/692G/711H/736M/750P/812E/830K/842S/871E/883H/894G/913R/932A, 24W/28S/29T/39Q/50V/62L/78E/87E/135Q/150S/266N/267K/437G/486E/522V/569T/670T/692G/711H/736M/750P/812E/830K/842S/871E/883H/8941/913R/932A, 24W/28S/29T/39N/50V/62L/78E/87E/135Q/150S/266N/267K/437G/486E/522V/569T/670T/692G/711H/736M/750P/812E/830K/842S/871E/883H/894G/913R/932A, 24W/28S/29T/39Q/50V/62L/78E/87E/135Q/150S/266N/267K/437G/486E/522V/569T/670T/711H/736M/750P/812E/830K/842S/871E/883H/894G/913R/932A, 24W/28S/29T/39Q/50V/62L/78E/87E/135Q/150S/266E/267K/437G/486E/522V/569T/670T/692G/711H/736M/750P/812E/830K/842S/871E/883H/894G/913R/932A, 24W/28S/29T/39Q/50V/62L/78C/87E/135Q/150S/266N/267K/437G/486E/522V/569T/670T/692G/711H/736M/750P/812E/830K/842S/871E/883H/894G/913R/932A, 24W/28S/29T/39Q/50V/62L/78E/87E/135Q/150S/266N/267K/437G/486E/522V/569T/670T/692G/711H/736M/750P/812E/830K/842S/871E/883H/913R/932A, 24W/28S/29T/39Q/50V/62L/78E/87E/135Q/150S/266N/267K/437G/486E/522V/569T/670T/692G/711H/736M/750P/812E/830K/842S/871E/883H/894G/913R/932P, 24W/28S/29T/39Q/50V/62L/78E/87E/135Q/150S/266N/267K/437G/486E/522V/569T/670T/692G/711H/736M/750P/812E/830K/842S/871E/883H/894G/913R/932D, 24W/28S/29T/39Q/50V/62L/78E/87E/135Q/150S/266N/267K/437G/486E/522V/569T/670T/692G/711H/736M/750P/812E/830Y/842S/871E/883H/894G/913R/932A, 24W/28S/29T/39Q/50V/62L/78E/87E/135K/150S/266N/267K/437G/486E/522V/569T/670T/692G/711H/736M/750P/812E/830K/842S/871E/883H/894G/913R/932A, 24W/28S/29T/39Q/50V/62L/78E/87E/135Q/150S/266N/267K/437G/486E/522V/569T/670T/692D/711H/736M/750P/812E/830K/842S/871E/883H/894G/913R/932A, 24W/28G/29T/39Q/50V/62L/78E/87E/135Q/150S/266N/267K/437G/486E/522V/569T/670T/692G/711H/736M/750P/812E/830K/842S/871E/883H/894G/913R/932A, 24W/28S/29T/39Q/50V/62L/78E/87E/135Q/150S/266N/267K/437G/486E/522V/569T/670T/692G/711N/736M/750P/812E/830K/842S/871E/883H/894G/913R/932A, 24W/28S/29T/39Q/50V/62L/78E/87E/135Q/150S/266N/267K/437G/486W/522V/569T/670T/692G/711H/736M/750P/812E/830K/842S/871E/883H/894G/913R/932A, 24W/28S/29T/39Q/50D/62L/78E/87E/135Q/150S/266N/267K/437G/486E/522V/569T/670T/692G/711H/736M/750P/812E/830K/842S/871E/883H/894G/913R/932A, 24W/28S/29T/39Q/50V/62L/78E/87E/135Q/150S/266N/267K/437G/486A/522V/569T/670T/692G/711H/736M/750P/812E/830K/842S/871E/883H/894G/913R/932A, 24W/28S/29T/39Q/50V/62L/78E/87E/135Q/150S/266N/267K/437G/486E/522V/569T/670T/692G/711H/736M/750P/812E/830K/842S/871E/883H/894N/913R/932A, 24W/28S/29T/39Q/50V/62L/78E/87E/135Q/150S/266N/267K/437G/486E/522V/569T/670T/692G/711H/736M/750P/812E/830K/842S/871E/883H/894G/913R/932G, 24W/28S/29T/39Q/50V/62L/78E/87E/135Q/150S/266N/267K/437G/486E/522V/569T/670T/692G/711D/736M/750P/812E/830K/842S/871E/883H/894G/913R/932A, 24W/28S/29T/39Q/50V/62L/78E/87E/135Q/150S/267K/437G/486E/522V/569T/670T/692G/711H/736M/750P/812E/830K/842S/871E/883H/894G/913R/932A, 24W/28S/29T/39Q/50V/62L/78E/87E/135Q/150S/266N/267K/437G/486E/522V/569T/670T/692G/711H/736M/750P/812E/830K/842S/871H/883H/894G/913R/932A, 24W/28S/29T/39Q/50V/62L/78E/87E/135Q/150S/266N/267K/437G/486H/522V/569T/670T/692G/711H/736M/750P/812E/830K/842S/871E/883H/894G/913R/932A, 24W/28S/29T/39Q/50V/62L/78E/87E/135Q/150S/266N/267K/437G/486E/522V/569T/670T/692G/711H/736M/750P/812E/830K/842S/871E/883H/894G/913K/932A, 24W/28S/29T/39Q/50V/62L/78E/87E/135Q/150S/266N/267K/437G/486E/522V/569T/670T/692G/711H/736M/750P/812E/830K/842S/871M/883H/894G/913R/932A, 24W/28S/29T/39E/50V/62L/78E/87E/135Q/150S/266N/267K/437G/486E/522V/569T/670T/692G/711H/736M/750P/812E/830K/842S/871E/883H/894G/913R/932A, 24W/28S/29T/39Q/50V/62L/78E/87E/135Q/150S/266N/267K/437G/486E/522V/569T/670T/692G/711H/736M/750P/812E/830K/842S/871E/883H/894G/913R/932N, 24W/28S/29T/39Q/50V/62L/78E/87E/135Q/150S/266N/267K/437G/486E/522V/569T/670T/692G/711H/736M/750P/812E/830K/842S/871E/883H/894G/913R/932M, 24W/28S/29T/39Q/50V/62L/78E/87E/135Q/150S/266N/267K/437G/486E/522V/569T/670T/692G/711H/736M/750P/812E/830K/842S/871E/883H/894G/913M/932A, 24W/28S/29T/39Q/50V/62L/78E/87E/135Q/150S/266N/267K/437G/486E/522V/569W/670T/692G/711H/736M/750P/812E/830K/842S/871E/883H/894G/913R/932A, 24W/28S/29T/39Q/50V/62L/78E/87E/135Q/150S/266N/267K/437G/486S/522V/569T/670T/692G/711H/736M/750P/812E/830K/842S/871E/883H/894G/913R/932A, 24W/28S/29T/39Q/50V/62L/78E/87E/135Q/150S/266N/267K/437G/486E/522V/569T/670T/692G/7111/736M/750P/812E/830K/842S/871E/883H/894G/913R/932A, 24W/28S/29T/39Q/50V/62L/78E/87E/135Q/150S/266N/267K/437G/486E/522V/569T/670T/692G/711C/736M/750P/812E/830K/842S/871E/883H/894G/913R/932A, 24W/28S/29T/39Q/50W/62L/78E/87E/135Q/150S/266N/267K/437G/486E/522V/569T/670T/692G/711H/736M/750P/812E/830K/842S/871E/883H/894G/913R/932A, 24W/28S/29T/39Q/50V/62L/78E/87E/135Q/150S/266N/267K/437G/486E/522C/569T/670T/692G/711H/736M/750P/812E/830K/842S/871E/883H/894G/913R/932A, 24W/28S/29T/39Q/50V/62L/78E/87E/135Q/150S/266N/267K/437G/522V/569T/670T/692G/711H/736M/750P/812E/830K/842S/871E/883H/894G/913R/932A, 24W/28S/29T/39Q/50V/62L/78E/87E/135Q/150S/266N/267K/437G/486E/522V/569T/670T/692G/711H/736M/750P/812E/830K/842S/871E/883H/894G/913R, 24W/28S/29W/39Q/50V/62L/78E/87E/135Q/150S/266N/267K/437G/486E/522V/569T/670T/692G/711H/736M/750P/812E/830K/842S/871E/883H/894G/913R/932A, 24W/28S/29T/39Q/50V/62L/78E/87E/135Q/150S/266N/267K/437G/486E/522V/569T/670T/692G/711H/736M/750P/812G/830K/842S/871E/883H/894G/913R/932A, 24W/28S/29T/39Q/50V/62L/78D/87E/135Q/150S/266N/267K/437G/486E/522V/569T/670T/692G/711H/736M/750P/812E/830K/842S/871E/883H/894G/913R/932A, 24W/28S/29T/39Q/50V/62L/78E/87E/135Q/150S/266N/267K/437G/486E/522V/569T/670T/692G/711H/736M/750P/812E/830K/842S/871D/883H/894G/913R/932A, 24W/28S/29T/39Q/50V/62L/78E/87E/135Q/150S/266N/267K/437G/486E/522V/569T/670T/692I/711H/736M/750P/812E/830K/842S/871E/883H/894G/913R/932A, 24W/28S/29F/39Q/50V/62L/78E/87E/135Q/150S/266N/267K/437G/486E/522V/569T/670T/692G/711H/736M/750P/812E/830K/842S/871E/883H/894G/913R/932A, 24W/28S/29T/39Q/50V/62L/78E/87E/135Q/150S/266N/267K/437G/486E/522M/569T/670T/692G/711H/736M/750P/812E/830K/842S/871E/883H/894G/913R/932A, 24W/28S/29T/39Q/50V/62L/78E/87E/135Q/150S/266N/267K/437G/486E/522V/569T/670N/692G/711H/736M/750P/812E/830K/842S/871E/883H/894G/913R/932A, 24W/28S/29M/39Q/50V/62L/78E/87E/135Q/150S/266N/267K/437G/486E/522V/569T/670T/692G/711H/736M/750P/812E/830K/842S/871E/883H/894G/913R/932A, 24W/28S/29T/39Q/50V/62L/78E/87E/135Q/150S/266N/267K/437G/486G/522V/569T/670T/692G/711H/736M/750P/812E/830K/842S/871E/883H/894G/913R/932A, 24W/28S/29T/39Q/50V/62L/78E/87E/135Q/150S/266N/267K/437G/486E/522V/569T/670T/692G/711H/736M/750P/812E/830K/842S/871E/883H/894G/913R/932K, 24W/28S/29T/39Q/50V/62Q/78E/87E/135Q/150S/266N/267K/437G/486E/522V/569T/670T/692G/711H/736M/750P/812E/830K/842S/871E/883H/894G/913R/932A, 24W/28S/29T/39Q/50V/62L/78E/87E/135Q/150S/266N/267K/437G/486E/522V/569T/670T/692G/711H/736M/750P/812E/830S/842S/871E/883H/894G/913R/932A, 24W/28S/29T/39Q/50V/62L/78E/87E/135Q/150S/266N/267K/437G/486E/522V/569T/670T/692G/711H/736M/750P/812S/830K/842S/871E/883H/894G/913R/932A, 24W/28S/29T/39Q/50V/62L/78E/87E/135Q/150S/266N/267K/437G/486E/522V/569T/670T/692G/711H/736M/750P/812E/830G/842S/871E/883H/894G/913R/932A, 24W/28S/29T/39Q/50V/62L/78E/87E/135Q/150S/266N/267K/437G/486M/522V/569T/670T/692G/711H/736M/750P/812E/830K/842S/871E/883H/894G/913R/932A, 24W/28S/29T/39Q/50V/62L/78E/87E/135Q/150S/266N/267K/437G/486E/522V/569T/670T/692G/711K/736M/750P/812E/830K/842S/871E/883H/894G/913R/932A, 24W/28S/29T/39Q/50V/62L/78E/87E/135Q/150S/266N/267K/437G/486E/522V/569T/670T/692G/711H/736M/750P/812E/830K/842S/871E/883H/894G/913R/932H, 24W/28S/29P/39Q/50V/62L/78E/87E/135Q/1505/266N/267K/437G/486E/522V/569T/670T/692G/711H/736M/750P/812E/830K/8425/871E/883H/894G/913R/932A, 24W/28S/29T/39Q/50V/62L/78E/87E/135Q/1505/266N/267K/437G/486E/522V/569T/670T/692W/711H/736M/750P/812E/830K/8425/871E/883H/894G/913R/932A, 24W/28S/29Y/39Q/50V/62L/78E/87E/135Q/1505/266N/267K/437G/486E/522V/569T/670T/692G/711H/736M/750P/812E/830K/8425/871E/883H/894G/913R/932A, 24W/28S/29T/39Q/50V/62L/78E/87E/135Q/1505/266N/267K/437G/486E/522V/569T/670T/692C/711H/736M/750P/812E/830K/8425/871E/883H/894G/913R/932A, 24W/28S/29G/39Q/50V/62L/78E/87E/135Q/1505/266N/267K/437G/486E/522V/569T/670T/692G/711H/736M/750P/812E/830K/8425/871E/883H/894G/913R/932A, 24W/28S/29T/39Q/50V/62L/78E/87E/135Q/1505/266N/267K/437G/486E/522V/569T/670T/692G/711H/736M/750P/812D/830K/8425/871E/883H/894G/913R/932A, 24W/28S/29T/39Q/50V/62L/78E/87E/135Q/1505/266N/267K/437G/486E/522V/569T/670T/692G/711H/736M/750P/812E/830K/8425/871E/883H/894G/913R/932C, 24W/28S/29T/39Q/50V/62L/78E/87E/135Q/1505/266N/267K/437G/486E/522V/569T/670T/692G/711H/736M/750P/812E/830K/8425/871I/883H/894G/913R/932A, 24W/28S/29T/39Q/50V/62L/78E/87E/135Q/1505/266N/267K/437G/486E/522V/569T/670T/692Y/711H/736M/750P/812E/830K/8425/871E/883H/894G/913R/932A, 24W/28S/29T/39Q/50V/62L/78E/87E/135Q/1505/266N/267K/437G/486E/522V/569T/670T/692G/711H/736M/750Q/812E/830K/8425/871E/883H/894G/913R/932A, 24W/28S/29T/39Q/50V/62L/78E/87E/135Q/1505/266N/267K/437G/486E/522V/569T/670T/692G/711H/736M/750P/812E/830H/8425/871E/883H/894G/913R/932A, 24W/28S/29T/39Q/50V/62L/78E/87E/135Q/1505/266N/267K/437G/486E/522V/569T/670T/692G/711H/736M/750P/812E/830K/842C/871E/883H/894G/913R/932A, 24W/28S/29T/39Q/50V/62L/78E/87E/135Q/1505/266N/267K/437G/486E/522V/569T/670T/692G/711H/736M/750P/812E/830K/8425/871S/883H/894G/913R/932A, 24W/28S/29T/39Q/50V/62L/78E/87E/135Q/150S/266N/267K/437G/486E/522V/569T/670T/692G/711H/736M/750P/812E/830K/8425/871C/883H/894G/913R/932A, or 24W/28S/29T/39Q/50V/62L/78E/87E/135Q/150S/266N/267K/437G/486E/522V/569T/670T/692G/711H/736M/750P/812E/830K/842S/871E/883H/894G/913W/932A, wherein the amino acid positions are relative to the reference sequence corresponding to residues 20-944 of SEQ ID NO: 2, or relative to the reference sequence corresponding to SEQ ID NO: 2.

[0167] In some embodiments, the amino acid sequence of the engineered acid alpha-glucosidase comprises a sequence comprising residues 20-944 of an even-numbered SEQ ID NO. of SEQ ID NOs: 14-754, or a sequence comprising an even-numbered SEQ ID NO. of SEQ ID NOs: 14-754.

[0168] In some embodiments, the amino acid sequence of the engineered acid alpha-glucosidase comprises residues 20-944 of SEQ ID NO: 14, 16, 18, 20, 22, 24, 26, 28, 30, 32, 34, 36, 38, 40, 42, 44, 46, 48, 50, 52, 54, 56, 58, 60, 62, 64, 66, 68, 70, 72, 74, 76, 78, 80, 82, 84, 86, 88, 90, 92, 94, 96, 98, 100, 102, 104, 106, 108, 110, 112, 114, 116, 118, 120, 122, 124, 126, 128, 130, 132, 134, 136, 138, 140, 142, 144, 146, 148, 150, 152, 154, 156, 158, 160, 162, 164, 166, 168, 170, 172, 174, 176, 178, 180, 182, 184, 186, 188, 190, 192, 194, 196, 198, 200, 202, 204, 206, 208, 210, 212, 214, 216, 218, 220, 222, 224, 226, 228, 230, 232, 234, 236, 238, 240, 242, 244, 246, 248, 250, 252, 254, 256, 258, 260, 262, 264, 266, 268, 270, 272, 274, 276, 278, 280, 282, 284, 286, 288, 290, 292, 294, 296, 298, 300, 302, 304, 306, 308, 310, 312, 314, 316, 318, 320, 322, 324, 326, 328, 330, 332, 334, 336, 338, 340, 342, 344, 346, 348, 350, 352, 354, 356, 358, 360, 362, 364, 366, 368, 370, 372, 374, 376, 378, 380, 382, 384, 386, 388, 390, 392, 394, 396, 398, 400, 402, 404, 406, 408, 410, 412, 414, 416, 418, 420, 422, 424, 426, 428, 430, 432, 434, 436, 438, 440, 442, 444, 446, 448, 450, 452, 454, 456, 458, 460, 462, 464, 466, 468, 470, 472, 474, 476, 478, 480, 482, 484, 486, 488, 490, 492, 494, 496, 498, 500, 502, 504, 506, 508, 510, 512, 514, 516, 518, 520, 522, 524, 526, 528, 530, 532, 534, 536, 538, 540, 542, 544, 546, 548, 550, 552, 554, 556, 558, 560, 562, 564, 566, 568, 570, 572, 574, 576, 578, 580, 582, 584, 586, 588, 590, 592, 594, 596, 598, 600, 602, 604, 606, 608, 610, 612, 614, 616, 618, 620, 622, 624, 626, 628, 630, 632, 634, 636, 638, 640, 642, 644, 646, 648, 650, 652, 654, 656, 658, 660, 662, 664, 666, 668, 670, 672, 674, 676, 678, 680, 682, 684, 686, 688, 690, 692, 694, 696, 698, 700, 702, 704, 706, 708, 710, 712, 714, 716, 718, 720, 722, 724, 726, 728, 730, 732, 734, 736, 738, 740, 742, 744, 746, 748, 750, 752, or 754. In some embodiments, the amino acid sequence optionally has 1, 2, 3, 4, 5, 6, 7, 8, 9, or up to 10 amino acid insertions, deletions, or substitutions. In some embodiments, the amino acid sequence optionally has 1, 2, 3, 4, 5, 6, 7, 8, 9, or up to 10 amino acid substitutions. In some embodiments, the amino acid sequence optionally has 1, 2, 3, 4, up to 5 amino acid insertions, deletions, or substitutions. In some embodiments, the amino acid sequence optionally has 1, 2, 3, 4, up to 5 amino acid substitutions. In some embodiments, the amino acid substitutions comprise non-conservative or conservative substitutions. In some embodiments, the amino acid substitutions comprise conservative substitutions. In some embodiments, guidance on non-conservative and conservative substitutions are provided by the variants and Examples disclosed herein.

[0169] In some embodiments, the amino acid sequence of the engineered acid alpha-glucosidase comprises SEQ ID NO: 14, 16, 18, 20, 22, 24, 26, 28, 30, 32, 34, 36, 38, 40, 42, 44, 46, 48, 50, 52, 54, 56, 58, 60, 62, 64, 66, 68, 70, 72, 74, 76, 78, 80, 82, 84, 86, 88, 90, 92, 94, 96, 98, 100, 102, 104, 106, 108, 110, 112, 114, 116, 118, 120, 122, 124, 126, 128, 130, 132, 134, 136, 138, 140, 142, 144, 146, 148, 150, 152, 154, 156, 158, 160, 162, 164, 166, 168, 170, 172, 174, 176, 178, 180, 182, 184, 186, 188, 190, 192, 194, 196, 198, 200, 202, 204, 206, 208, 210, 212, 214, 216, 218, 220, 222, 224, 226, 228, 230, 232, 234, 236, 238, 240, 242, 244, 246, 248, 250, 252, 254, 256, 258, 260, 262, 264, 266, 268, 270, 272, 274, 276, 278, 280, 282, 284, 286, 288, 290, 292, 294, 296, 298, 300, 302, 304, 306, 308, 310, 312, 314, 316, 318, 320, 322, 324, 326, 328, 330, 332, 334, 336, 338, 340, 342, 344, 346, 348, 350, 352, 354, 356, 358, 360, 362, 364, 366, 368, 370, 372, 374, 376, 378, 380, 382, 384, 386, 388, 390, 392, 394, 396, 398, 400, 402, 404, 406, 408, 410, 412, 414, 416, 418, 420, 422, 424, 426, 428, 430, 432, 434, 436, 438, 440, 442, 444, 446, 448, 450, 452, 454, 456, 458, 460, 462, 464, 466, 468, 470, 472, 474, 476, 478, 480, 482, 484, 486, 488, 490, 492, 494, 496, 498, 500, 502, 504, 506, 508, 510, 512, 514, 516, 518, 520, 522, 524, 526, 528, 530, 532, 534, 536, 538, 540, 542, 544, 546, 548, 550, 552, 554, 556, 558, 560, 562, 564, 566, 568, 570, 572, 574, 576, 578, 580, 582, 584, 586, 588, 590, 592, 594, 596, 598, 600, 602, 604, 606, 608, 610, 612, 614, 616, 618, 620, 622, 624, 626, 628, 630, 632, 634, 636, 638, 640, 642, 644, 646, 648, 650, 652, 654, 656, 658, 660, 662, 664, 666, 668, 670, 672, 674, 676, 678, 680, 682, 684, 686, 688, 690, 692, 694, 696, 698, 700, 702, 704, 706, 708, 710, 712, 714, 716, 718, 720, 722, 724, 726, 728, 730, 732, 734, 736, 738, 740, 742, 744, 746, 748, 750, 752, or 754. In some embodiments, the amino acid sequence optionally has 1, 2, 3, 4, 5, 6, 7, 8, 9, or up to 10 amino acid insertions, deletions, or substitutions. In some embodiments, the amino acid sequence optionally has 1, 2, 3, 4, 5, 6, 7, 8, 9, or up to 10 amino acid substitutions. In some embodiments, the amino acid sequence optionally has 1, 2, 3, 4, up to 5 amino acid insertions, deletions, or substitutions. In some embodiments, the amino acid sequence optionally has 1, 2, 3, 4, up to 5 amino acid substitutions. In some embodiments, the amino acid substitutions comprises non-conservative or conservative substitutions. In some embodiments, the amino acid substitutions comprise conservative substitutions. In some embodiments, guidance on non-conservative and conservative substitutions are provided by the variants and Examples disclosed herein.

[0170] In some embodiments, the engineered acid alpha-glucosidase of the present disclosure has acid alpha-glucosidase activity. In some embodiments, the engineered acid alpha-glucosidase has acid alpha-glucosidase activity and at least one improved or enhanced property as compared to a reference acid alpha-glucosidase.

[0171] In some embodiments, the engineered acid alpha-glucosidase is more thermostable than the reference acid alpha-glucosidase.

[0172] In some embodiments, the engineered acid alpha-glucosidase is more stable at pH 7 (e.g., at neutral pH) than the reference acid alpha-glucosidase.

[0173] In some embodiments, the engineered acid alpha-glucosidase is more stable at acid pi, particularly about pH 4.4, than the reference acid alpha-glucosidase.

[0174] In some embodiments, the engineered acid alpha-glucosidase exhibits increased expression than the reference acid alpha-glucosidase.

[0175] In some embodiments, the engineered acid alpha-glucosidase is more stable in lysosomes than the reference acid alpha-glucosidase.

[0176] In some embodiments, the engineered acid alpha-glucosidase is more stable in plasma, particularly human plasma, than the reference acid alpha-glucosidase.

[0177] In some embodiments, the engineered acid alpha-glucosidase is more readily taken up human cells, than the reference acid alpha-glucosidase.

[0178] In some embodiments, the engineered acid alpha-glucosidase exhibits greater enzymatic activity in cell lysates than the reference acid alpha-glucosidase.

[0179] In some embodiments, the engineered acid alpha-glucosidase exhibits reduced immunogenicity as compared to the reference acid alpha-glucosidase.

[0180] In some embodiments, the reference acid alpha-glucosidase has a sequence corresponding to residues 20-944 of SEQ ID NO: 2 or 12, or a sequence corresponding to SEQ ID NO: 2 or 12. In some embodiments, the reference acid alpha-glucosidase has the sequence corresponding to residues 20-944 of SEQ ID NO: 2, or the sequence corresponding to SEQ ID NO: 2. In some embodiments, the reference acid alpha-glucosidase has the sequence corresponding to residues 20-944 of SEQ ID NO: 12, or the sequence corresponding to SEQ ID NO: 12. Exemplary improved properties are provided in the Examples.

[0181] In some embodiments, the engineered acid alpha-glucosidase exhibits at least one improved property selected from: i) enhanced catalytic activity; ii) increased tolerance to pH 7; iii) increased tolerance to pH 4.4; iv) increased stability in lysosomes; v) increased expression; vi) increased uptake into cells; vii) increased enzymatic activity in cell lysates; viii) increased stability in plasma/serum; and ix) reduced immunogenicity; or a combination of any of i), ii), iii), iv), v), vi), vii), viii), and ix) as compared to a reference acid alpha-glucosidase. In some embodiments, the reference acid alpha-glucosidase has the sequence corresponding to residues 20-944 of SEQ ID NO: 2 or 12, or the sequence corresponding to SEQ ID NO: 2 or 12. In some embodiments, the reference acid alpha-glucosidase has the sequence corresponding to residues 20-944 of SEQ ID NO: 12, or the sequence corresponding to SEQ ID NO: 12.

[0182] In some embodiments, the engineered acid alpha-glucosidase exhibits reduced immunogenicity as compared to the reference acid alpha-glucosidase having a sequence corresponding to residues 20-944 of SEQ ID NO: 2 or 12, or a sequence corresponding to SEQ ID NO: 2 or 12. In some embodiments, the engineered acid alpha-glucosidase exhibits a reduction in Total Immunogenic Score (TIS) of greater than 10, greater than 100, or greater than 200 as compared to the reference acid alpha-glucosidase of SEQ ID NO: 2. In some embodiments, the engineered acid alpha-glucosidase exhibits a reduction in Immunogenic Hit Count (IHC) of greater than 2, greater than 5, or greater than 20 as compared to the reference acid alpha-glucosidase of SEQ ID NO: 2. In some embodiments, the engineered acid alpha-glucosidase exhibits a reduction in Total Immunogenic Score (TIS) of greater than 10, greater than 100, or greater than 200 as compared to the reference acid alpha-glucosidase of SEQ ID NO: 12. In some embodiments, the engineered acid alpha-glucosidase exhibits a reduction in Immunogenic Hit Count (IHC) of greater than 2, greater than 5, or greater than 20 as compared to the reference acid alpha-glucosidase of SEQ ID NO: 12. Exemplary engineered acid alpha-glucosidase polypeptides exhibiting reduced immunogenicity based on TIS and/or IHC can be selected from the engineered acid alpha-glucosidase presented in Table 4-1 of the Examples.

[0183] In some embodiments, the engineered acid alpha-glucosidase exhibits lower numbers of sequence regions presented by antigen-presenting cells and/or reduced frequency of peptide presentation as compared to a reference acid alpha-glucosidase polypeptide, in particular the reference acid alpha-glucosidase polypeptide corresponding to SEQ ID NO: 2, in a MHC associated peptide proteomics (MAPPs) assay, as provided in the Examples.

[0184] In some embodiments, the engineered acid alpha-glucosidase described herein comprises a pre-pro-polypeptide of the engineered acid alpha-glucosidase. In some embodiments, the pre-pro-polypeptide of the engineered acid alpha-glucosidase comprises a eukaryotic or synthetic signal peptide sequence. In some embodiments, the signal peptide of the pre-pro-polypeptide of the engineered acid alpha-glucosidase comprises a mouse or human signal peptide sequence. In some embodiments, the signal peptide comprises a sequence comprising residues 1-19 of SEQ ID NO: 2 or 12.

[0185] In some embodiments, the engineered acid alpha-glucosidase comprises a pro-polypeptide of the engineered acid alpha-glucosidase described herein. In some embodiments, the pro-polypeptide of the engineered acid alpha-glucosidase lacks a signal sequence. In some embodiments, the pro-polypeptide of the engineered acid alpha-glucosidase comprises residues 20-944 of an engineered acid alpha-glucosidase described herein.

[0186] In some embodiments, the engineered acid alpha-glucosidase is a mature form of an engineered acid alpha-glucosidase polypeptide described herein. In some embodiments, the mature form of the engineered acid alpha-glucosidase is a secreted form of the engineered acid alpha-glucosidase.

[0187] In some embodiments, the engineered acid alpha-glucosidase further comprises a fusion polypeptide. In some embodiments, the engineered acid alpha-glucosidase polypeptide described herein can be fused to a variety of polypeptide sequences, such as, by way of example and not limitation, polypeptide tags that can be used for detection and/or purification. In some embodiments, the fusion protein of the engineered acid alpha-glucosidase polypeptides comprises a glycine-histidine or histidine-tag (His-tag). In some embodiments, the fusion protein of the engineered acid alpha-glucosidase polypeptide comprises an epitope tag, such as c-myc, FLAG, V5, or hemagglutinin (HA). In some embodiments, the fusion protein of the engineered acid alpha-glucosidase polypeptide comprises a GST, SUMO, Strep, MBP, or GFP tag. In some embodiments, the fusion is to the amino (N-) terminus of an engineered acid alpha-glucosidase polypeptide. In some embodiments, the fusion is to the carboxy (C-) terminus of the engineered acid alpha-glucosidase polypeptide. In some embodiments, the fusion polypeptide is inserted following the signal sequence and before the engineered acid alpha-glucosidase polypeptide to allow expression and secretion of a polypeptide comprising the fusion polypeptide (e.g., polypeptide tag) and polypeptide.

[0188] In some embodiments, the engineered acid alpha-glucosidase is an isolated or purified preparation. In some embodiments, the engineered acid alpha-glucosidase is purified from a mixture (e.g., from cells or culture medium) using any one or more of the known techniques for protein purification, including, among others, lysozyme treatment, sonication, filtration, salting-out, ultra-centrifugation, and chromatography.

[0189] Chromatographic techniques for isolation and purification of the engineered acid alpha-glucosidase polypeptides include, among others, reverse phase chromatography, high-performance liquid chromatography, ion-exchange chromatography, hydrophobic-interaction chromatography, size-exclusion chromatography, gel electrophoresis, and affinity chromatography. Conditions for purifying a particular protein depends, in part, on factors such as net charge, hydrophobicity, hydrophilicity, molecular weight, molecular shape, etc., and will be apparent to those having skill in the art. In some embodiments, affinity techniques may be used to isolate the polypeptides. For affinity chromatography purification, any antibody that specifically binds acid alpha-glucosidase polypeptide of interest may find use. For the production of antibodies, various host animals, including but not limited to rabbits, mice, rats, camelids, etc., are immunized by injection with an engineered acid alpha-glucosidase polypeptide, or a fragment thereof.

[0190] In some embodiments, the present disclosure further provides functional fragments or biologically active fragments of an engineered acid alpha-glucosidase polypeptide described herein. Thus, for each and every embodiment herein of an engineered acid alpha-glucosidase, a functional fragment or biologically active fragment of the engineered acid alpha-glucosidase is provided herewith. In some embodiments, a functional fragment or biologically active fragments of an engineered acid alpha-glucosidase comprises at least about 90%, at least about 95%, at least about 96%, at least about 97%, at least about 98%, or at least about 99% of the activity of the acid alpha-glucosidase polypeptide from which it was derived (i.e., the parent acid alpha-glucosidase).

[0191] In some embodiments, a functional or biologically active fragment of an engineered acid alpha-glucosidase herein comprises at least 70%, 75%, 80%, 81%, 82%, 83%, 84%, 85%, 86%, 87%, 88%, 89%, 90%, 91%, 92%, 93%, 94%, 95%, 96%, 97%, 98%, or 99% of the parent sequence of the engineered acid alpha-glucosidase. In some embodiments, functional fragment or biologically active fragment comprises at least 90%, 91%, 92%, 93%, 94%, 95%, 96%, 97%, 98%, or 99% of the parent sequence of the acid alpha-glucosidase. In some embodiments, the functional fragment will be truncated by less than 5, less than 10, less than 15, less than 10, less than 25, less than 30, less than 35, less than 40, less than 45, less than 50, less than 55, less than 60, less than 65, or less than 70 amino acids.

[0192] In some embodiments, the functional fragments or biologically active fragments of the engineered acid alpha-glucosidase polypeptide described herein include at least a substitution or substitution set in the amino acid sequence of the engineered acid alpha-glucosidase described herein. Accordingly, in some embodiments, the functional fragment(s) or biologically active fragment(s) of the engineered acid alpha-glucosidase displays the enhanced or improved property associated with the substitution or substitution set in the parent acid alpha-glucosidase.

### Polynucleotides Encoding Recombinant Polypeptides, Expression Vectors, and Host Cells

[0193] In another aspect, the present disclosure provides recombinant polynucleotides encoding the engineered acid alpha-glucosidase polypeptides described herein. In some embodiments, the polynucleotides are operably linked to one or more heterologous or homologous regulatory sequences that control gene expression to create a recombinant polynucleotide capable of expressing the polypeptide. Expression constructs containing a heterologous polynucleotide encoding the engineered acid alpha-glucosidase polypeptides can be introduced into appropriate host cells to express the corresponding engineered acid alpha-glucosidase polypeptide.

[0194] As will be apparent to the skilled artisan, availability of a protein sequence and the knowledge of the codons corresponding to the various amino acids provide a description of all the polynucleotides capable of encoding the subject polypeptides. The degeneracy of the genetic code, where the same amino acids are encoded by alternative or synonymous codons, allows an extremely large number of nucleic acids to be made, all of which encode the engineered acid alpha-glucosidase polypeptide. Thus, having knowledge of a particular amino acid sequence, those skilled in the art could make any number of different nucleic acids by simply modifying the sequence of one or more codons in a way which does not change the amino acid sequence of the protein. In this regard, the present disclosure specifically contemplates each and every possible variation of polynucleotides that could be made encoding the engineered acid alpha-glucosidase polypeptides described herein by selecting combinations based on the possible codon choices, and all such variations are to be considered specifically disclosed for any polypeptide described herein, including the engineered acid alpha-glucosidase variants provided in the Examples.

[0195] In some embodiments, the recombinant polynucleotide is codon optimized. In other words, the codons are preferably selected to fit the host cell in which the protein is being produced. For example, preferred codons used in bacteria are used for expression in bacteria, preferred codons used in fungi are typically used for expression in fungi, and preferred codons used in mammals are used for expression in mammals and mammalian cells. In some embodiments, codon optimized polynucleotides encoding an engineered acid alpha-glucosidase polypeptide contains preferred codons at about 40%, 50%, 60%, 70%, 80%, or greater than 90% of codon positions of the full length coding region. In some embodiments, the present disclosure provides recombinant polynucleotide sequences in which the codons are optimized for expression in human cells or tissues.

[0196] As discussed above, it is to be understood that the present disclosure provides recombinant polynucleotides encoding each and every engineered acid alpha-glucosidase polypeptides described herein. Accordingly by way of example and not limitation, in some embodiments, a recombinant polynucleotide of the present disclosure comprises a polynucleotide sequence encoding an engineered acid alpha-glucosidase, or biologically active fragment thereof, comprising an amino acid sequence having at least 80%, 81%, 82%, 83%, 84%, 85%, 86%, 87%, 88%, 89%, 90%, 91%, 92%, 93%, 94%, 95%, 96%, 97%, 98%, or 99% or more sequence identity to a reference sequence corresponding to residues 20-944 of an even numbered SEQ ID NO. of SEQ ID NOs: 2, 12, and 14-754, or to an even numbered SEQ ID NO. of SEQ ID NOs: 2, 12, and 14-754, wherein the amino acid sequence comprises one or more substitutions relative to the reference sequence corresponding to residues 20-944 of SEQ ID NO: 12 or 2, or relative to the reference sequence corresponding to SEQ ID NO: 12 or 2.

[0197] In some embodiments, the recombinant polynucleotide comprises a polynucleotide sequence encoding an engineered acid alpha-glucosidase comprising an amino acid sequence having at least 80%, 81%, 82%, 83%, 84%, 85%, 86%, 87%, 88%, 89%, 90%, 91%, 92%, 93%, 94%, 95%, 96%, 97%, 98%, 99% or more sequence identity to the reference sequence corresponding to residues 20-944 of SEQ ID NO: 12 or 2, or to the reference sequence corresponding to SEQ ID NO: 12 or 2, wherein the amino acid sequence comprises one or more substitutions relative to the reference sequence corresponding to residues 20-944 of SEQ ID NO: 12 or 2, or relative to the reference sequence corresponding to SEQ ID NO: 12 or 2.

[0198] In some embodiments, the recombinant polynucleotide comprises a polynucleotide sequence encoding an engineered acid alpha-glucosidase comprising an amino acid sequence having at least 80%, 81%, 82%, 83%, 84%, 85%, 86%, 87%, 88%, 89%, 90%, 91%, 92%, 93%, 94%, 95%, 96%, 97%, 98%, or 99% or more sequence identity to the reference sequence corresponding to residues 20-944 of SEQ ID NO: 12, or to the reference sequence corresponding to SEQ ID NO: 12, wherein the amino acid sequence comprises one or more substitutions relative to the reference sequence corresponding to residues 20-944 of SEQ ID NO: 12, or relative to the reference sequence corresponding to SEQ ID NO: 12.

[0199] In some embodiments, the recombinant polynucleotide comprises a polynucleotide sequence encoding an engineered acid alpha-glucosidase comprising an amino acid sequence having at least 80%, 81%, 82%, 83%, 84%, 85%, 86%, 87%, 88%, 89%, 90%, 91%, 92%, 93%, 94%, 95%, 96%, 97%, 98%, or 99% or more sequence identity to a reference sequence corresponding to residues 20-944 of an even numbered SEQ ID NO. of SEQ ID NOs: 14-754, or to a reference sequence corresponding to an even numbered SEQ ID NO. of SEQ ID NOs: 14-754, wherein the amino acid sequence comprises one or more substitutions relative to the reference sequence corresponding to residues 20-944 of SEQ ID NO: 12 or 2, or relative to the reference sequence corresponding to SEQ ID NO: 12 or 2.

[0200] In some embodiments, the recombinant polynucleotide comprises a polynucleotide sequence encoding an engineered acid alpha-glucosidase comprising an amino acid sequence comprising at least a substitution at amino acid position 24, 28, 29, 39, 50, 62, 78, 87, 135, 150, 266, 267, 305, 437, 486, 522, 569, 670, 692, 711, 736, 750, 812, 830, 842, 871, 883, 894, 913, or 932, or combinations thereof, wherein the amino acid positions are relative to the reference sequence corresponding to residues 20-944 of SEQ ID NO: 12, or relative to the reference sequence corresponding to SEQ ID NO: 12.

[0201] In some embodiments, the recombinant polynucleotide encodes an engineered acid alpha-glucosidase comprising an amino acid sequence comprising at least a substitution at amino acid position 305.

[0202] In some embodiments, the recombinant polynucleotide encodes an engineered acid alpha-glucosidase comprising an amino acid sequence comprising at least a substitution at amino acid position 24.

[0203] In some embodiments, the recombinant polynucleotide encodes an engineered acid alpha-glucosidase comprising an amino acid sequence comprising at least a substitution at amino acid position 28.

[0204] In some embodiments, the recombinant polynucleotide encodes an engineered acid alpha-glucosidase comprising an amino acid sequence comprising at least a substitution at amino acid position 29.

[0205] In some embodiments, the recombinant polynucleotide encodes an engineered acid alpha-glucosidase comprising an amino acid sequence comprising at least a substitution at amino acid position 39.

[0206] In some embodiments, the recombinant polynucleotide encodes an engineered acid alpha-glucosidase comprising an amino acid sequence comprising at least a substitution at amino acid position 50.

[0207] In some embodiments, the recombinant polynucleotide encodes an engineered acid alpha-glucosidase comprising an amino acid sequence comprising at least a substitution at amino acid position 62.

[0208] In some embodiments, the recombinant polynucleotide encodes an engineered acid alpha-glucosidase comprising an amino acid sequence comprising at least a substitution at amino acid position 78.

[0209] In some embodiments, the recombinant polynucleotide encodes an engineered acid alpha-glucosidase comprising an amino acid sequence comprising at least a substitution at amino acid position 87.

[0210] In some embodiments, the recombinant polynucleotide encodes an engineered acid alpha-glucosidase comprising an amino acid sequence comprising at least a substitution at amino acid position 135.

[0211] In some embodiments, the recombinant polynucleotide encodes an engineered acid alpha-glucosidase comprising an amino acid sequence comprising at least a substitution at amino acid position 150.

[0212] In some embodiments, the recombinant polynucleotide encodes an engineered acid alpha-glucosidase comprising an amino acid sequence comprising at least a substitution at amino acid position 266.

[0213] In some embodiments, the recombinant polynucleotide encodes an engineered acid alpha-glucosidase comprising an amino acid sequence comprising at least a substitution at amino acid position 267.

[0214] In some embodiments, the recombinant polynucleotide encodes an engineered acid alpha-glucosidase comprising an amino acid sequence comprising at least a substitution at amino acid position 437.

[0215] In some embodiments, the recombinant polynucleotide encodes an engineered acid alpha-glucosidase comprising an amino acid sequence comprising at least a substitution at amino acid position 486.

[0216] In some embodiments, the recombinant polynucleotide encodes an engineered acid alpha-glucosidase comprising an amino acid sequence comprising at least a substitution at amino acid position 522.

[0217] In some embodiments, the recombinant polynucleotide encodes an engineered acid alpha-glucosidase comprising an amino acid sequence comprising at least a substitution at amino acid position 569.

[0218] In some embodiments, the recombinant polynucleotide encodes an engineered acid alpha-glucosidase comprising an amino acid sequence comprising at least a substitution at amino acid position 670.

[0219] In some embodiments, the recombinant polynucleotide encodes an engineered acid alpha-glucosidase comprising an amino acid sequence comprising at least a substitution at amino acid position 692.

[0220] In some embodiments, the recombinant polynucleotide encodes an engineered acid alpha-glucosidase comprising an amino acid sequence comprising at least a substitution at amino acid position 711.

[0221] In some embodiments, the recombinant polynucleotide encodes an engineered acid alpha-glucosidase comprising an amino acid sequence comprising at least a substitution at amino acid position 736.

[0222] In some embodiments, the recombinant polynucleotide encodes an engineered acid alpha-glucosidase comprising an amino acid sequence comprising at least a substitution at amino acid position 750.

[0223] In some embodiments, the recombinant polynucleotide encodes an engineered acid alpha-glucosidase comprising an amino acid sequence comprising at least a substitution at amino acid position 812.

[0224] In some embodiments, the recombinant polynucleotide encodes an engineered acid alpha-glucosidase comprising an amino acid sequence comprising at least a substitution at amino acid position 830.

[0225] In some embodiments, the recombinant polynucleotide encodes an engineered acid alpha-glucosidase comprising an amino acid sequence comprising at least a substitution at amino acid position 842.

[0226] In some embodiments, the recombinant polynucleotide encodes an engineered acid alpha-glucosidase comprising an amino acid sequence comprising at least a substitution at amino acid position 305.

[0227] In some embodiments, the recombinant polynucleotide encodes an engineered acid alpha-glucosidase comprising an amino acid sequence comprising at least a substitution at amino acid position 883.

[0228] In some embodiments, the recombinant polynucleotide encodes an engineered acid alpha-glucosidase comprising an amino acid sequence comprising at least a substitution at amino acid position 894.

[0229] In some embodiments, the recombinant polynucleotide encodes an engineered acid alpha-glucosidase comprising an amino acid sequence comprising at least a substitution at amino acid position 913.

[0230] In some embodiments, the recombinant polynucleotide encodes an engineered acid alpha-glucosidase comprising an amino acid sequence comprising at least a substitution at amino acid position 932.

[0231] In some embodiments, the recombinant polynucleotide comprises a polynucleotide sequence encoding an engineered acid alpha-glucosidase comprising an amino acid sequence having at least 80%, 81%, 82%, 83%, 84%, 85%, 86%, 87%, 88%, 89%, 90%, 91%, 92%, 93%, 94%, 95%, 96%, 97%, 98%, or 99% or more sequence identity to an engineered acid alpha-glucosidase with a substitution or substitution set as set forth in Table 3-1, wherein the amino acid positions are relative to the reference sequence corresponding to residues 20-944 of SEQ ID NO: 12 or 2, or relative to the reference sequence corresponding to SEQ ID NO: 12 or 2.

[0232] In some embodiments, the recombinant polynucleotide comprises a polynucleotide sequence encoding an engineered acid alpha-glucosidase comprising an amino acid sequence comprising at least one substitution as set forth in Table 3-1, wherein the amino acid positions are relative to the reference sequence corresponding to residues 20-944 of SEQ ID NO: 12 or 2, or relative to the reference sequence corresponding to SEQ ID NO: 12 or 2.

[0233] In some embodiments, the recombinant polynucleotide comprises a polynucleotide sequence encoding an engineered acid alpha-glucosidase comprising an amino acid sequence comprising at least a substitution set as set forth in Table 3-1, wherein the amino acid positions are relative to the reference sequence corresponding to residues 20-944 of SEQ ID NO: 12 or 2, or relative to the reference sequence corresponding to SEQ ID NO: 12 or 2.

[0234] In some embodiments, the recombinant polynucleotide comprises a polynucleotide sequence encoding an engineered acid alpha-glucosidase comprising an amino acid sequence comprising at least a substitution set at amino acid positions 24/28/29/39/50/62/78/87/135/150/266/267/305/437/486/522/569/670/692/711/736/750/812/830/842/871/883/894/913/932, 24/28/29/39/50/62/78/87/135/150/266/267/437/486/522/569/670/692/711/736/750/812/830/842/871/883/894/913/932, 24/28/29/39/50/62/78/87/135/150/266/267/437/486/522/569/670/692/711/736/750/812/830/871/883/894/913/932, 28/29/39/50/62/78/87/135/150/266/267/437/486/522/569/670/692/711/736/750/812/830/842/871/883/89 4/913/932, 24/28/29/39/50/78/87/135/150/266/267/437/486/522/569/670/692/711/736/750/812/830/842/871/883/89 4/913/932, 24/28/29/39/50/62/78/87/135/150/266/267/437/486/522/569/670/692/711/736/750/812/830/842/883/894/913/932, 24/28/29/39/50/62/78/87/135/150/266/267/437/486/522/670/692/711/736/750/812/830/842/871/883/894/913/932, 24/28/29/39/50/62/78/87/135/150/266/267/437/486/522/569/692/711/736/750/812/830/842/871/883/894/913/932, 24/28/29/39/50/62/78/87/135/150/266/267/437/486/522/569/670/692/736/750/812/830/842/871/883/894/913/932, 24/28/29/39/50/62/78/87/135/150/266/267/437/486/522/569/670/692/711/750/812/830/842/871/883/894/913/932, 24/28/29/39/50/62/78/87/135/150/266/267/437/486/569/670/692/711/736/750/812/830/842/871/883/894/913/932, 24/28/29/39/50/62/78/87/135/150/266/267/437/486/522/569/670/692/711/736/812/830/842/871/883/894/913/932, 24/28/39/50/62/78/87/135/150/266/267/437/486/522/569/670/692/711/736/750/812/830/842/871/883/89 4/913/932, 24/28/29/39/50/62/78/87/135/150/266/437/486/522/569/670/692/711/736/750/812/830/842/871/883/894/913/932, 24/29/39/50/62/78/87/135/150/266/267/437/486/522/569/670/692/711/736/750/812/830/842/871/883/89 4/913/932, 24/28/29/39/50/62/78/135/150/266/267/437/486/522/569/670/692/711/736/750/812/830/842/871/883/89 4/913/932, 24/28/29/39/50/62/78/87/135/150/266/267/486/522/569/670/692/711/736/750/812/830/842/871/883/894/913/932, 24/28/29/39/50/62/87/135/150/266/267/437/486/522/569/670/692/711/736/750/812/830/842/871/883/89 4/913/932, 24/28/29/39/50/62/78/87/135/150/266/267/437/486/522/569/670/692/711/736/750/812/830/8425/871/88 3/894/913/932, 24/28/29/39/50/62/78/87/135/266/267/437/486/522/569/670/692/711/736/750/812/830/842/871/883/894/913/932, 24/28/29/39/50/62/78/87/135/150/266/267/437/486/522/569/670/692/711/736/750/812/842/871/883/894/913/932, 24/28/29/39/50/62/78/87/135/150/266/267/437/486/522/569/670/692/711/736/750/830/842/871/883/894/913/932, 24/28/29/39/62/78/87/135/150/266/267/437/486/522/569/670/692/711/736/750/812/830/842/871/883/89 4/913/932, 24/28/29/39/50/62/78/87/135/150/266/267/437/486/522/569/670/711/736/750/812/830/842/871/883/894/913/932, 24/28/29/39/50/62/78/87/135/150/266/267/437/486/522/569/670/692/711/736/750/812/830/842/871/883/913/932, 24/28/29/39/50/62/78/87/135/150/267/437/486/522/569/670/692/711/736/750/812/830/842/871/883/894/913/932, 24/28/29/39/50/62/78/87/135/150/266/267/437/522/569/670/692/711/736/750/812/830/842/871/883/894/913/932, 24/28/29/39/50/62/78/87/135/150/266/267/437/486/522/569/670/692/711/736/750/812/830/842/871/883/894/913, or 24/28/29/39/50/62/78/87/135/150/266/267/437/486/522/569/670/692/711/736/750/8125/830/842/871/88 3/894/913/932, wherein the positions are relative to SEQ ID NO: 2.

[0235] In some embodiments, the recombinant polynucleotide comprises a polynucleotide sequence encoding an engineered acid alpha-glucosidase comprising an amino acid sequence comprising residues 20-944 of an even-numbered SEQ ID NO. of SEQ ID NOs: 14-754, or comprising an even-numbered SEQ ID NO. of SEQ ID NOs: 14-754.

[0236] In some embodiments, the recombinant polynucleotide comprises a polynucleotide sequence encoding an engineered acid alpha-glucosidase comprising an amino acid sequence comprising residues 20-944 of SEQ ID NO: 14, 16, 18, 20, 22, 24, 26, 28, 30, 32, 34, 36, 38, 40, 42, 44, 46, 48, 50, 52, 54, 56, 58, 60, 62, 64, 66, 68, 70, 72, 74, 76, 78, 80, 82, 84, 86, 88, 90, 92, 94, 96, 98, 100, 102, 104, 106, 108, 110, 112, 114, 116, 118, 120, 122, 124, 126, 128, 130, 132, 134, 136, 138, 140, 142, 144, 146, 148, 150, 152, 154, 156, 158, 160, 162, 164, 166, 168, 170, 172, 174, 176, 178, 180, 182, 184, 186, 188, 190, 192, 194, 196, 198, 200, 202, 204, 206, 208, 210, 212, 214, 216, 218, 220, 222, 224, 226, 228, 230, 232, 234, 236, 238, 240, 242, 244, 246, 248, 250, 252, 254, 256, 258, 260, 262, 264, 266, 268, 270, 272, 274, 276, 278, 280, 282, 284, 286, 288, 290, 292, 294, 296, 298, 300, 302, 304, 306, 308, 310, 312, 314, 316, 318, 320, 322, 324, 326, 328, 330, 332, 334, 336, 338, 340, 342, 344, 346, 348, 350, 352, 354, 356, 358, 360, 362, 364, 366, 368, 370, 372, 374, 376, 378, 380, 382, 384, 386, 388, 390, 392, 394, 396, 398, 400, 402, 404, 406, 408, 410, 412, 414, 416, 418, 420, 422, 424, 426, 428, 430, 432, 434, 436, 438, 440, 442, 444, 446, 448, 450, 452, 454, 456, 458, 460, 462, 464, 466, 468, 470, 472, 474, 476, 478, 480, 482, 484, 486, 488, 490, 492, 494, 496, 498, 500, 502, 504, 506, 508, 510, 512, 514, 516, 518, 520, 522, 524, 526, 528, 530, 532, 534, 536, 538, 540, 542, 544, 546, 548, 550, 552, 554, 556, 558, 560, 562, 564, 566, 568, 570, 572, 574, 576, 578, 580, 582, 584, 586, 588, 590, 592, 594, 596, 598, 600, 602, 604, 606, 608, 610, 612, 614, 616, 618, 620, 622, 624, 626, 628, 630, 632, 634, 636, 638, 640, 642, 644, 646, 648, 650, 652, 654, 656, 658, 660, 662, 664, 666, 668, 670, 672, 674, 676, 678, 680, 682, 684, 686, 688, 690, 692, 694, 696, 698, 700, 702, 704, 706, 708, 710, 712, 714, 716, 718, 720, 722, 724, 726, 728, 730, 732, 734, 736, 738, 740, 742, 744, 746, 748, 750, 752, or 754.

[0237] In some embodiments, the recombinant polynucleotide comprises a polynucleotide sequence encoding an engineered acid alpha-glucosidase comprising an amino acid sequence comprising SEQ ID NO: 14, 16, 18, 20, 22, 24, 26, 28, 30, 32, 34, 36, 38, 40, 42, 44, 46, 48, 50, 52, 54, 56, 58, 60, 62, 64, 66, 68, 70, 72, 74, 76, 78, 80, 82, 84, 86, 88, 90, 92, 94, 96, 98, 100, 102, 104, 106, 108, 110, 112, 114, 116, 118, 120, 122, 124, 126, 128, 130, 132, 134, 136, 138, 140, 142, 144, 146, 148, 150, 152, 154, 156, 158, 160, 162, 164, 166, 168, 170, 172, 174, 176, 178, 180, 182, 184, 186, 188, 190, 192, 194, 196, 198, 200, 202, 204, 206, 208, 210, 212, 214, 216, 218, 220, 222, 224, 226, 228, 230, 232, 234, 236, 238, 240, 242, 244, 246, 248, 250, 252, 254, 256, 258, 260, 262, 264, 266, 268, 270, 272, 274, 276, 278, 280, 282, 284, 286, 288, 290, 292, 294, 296, 298, 300, 302, 304, 306, 308, 310, 312, 314, 316, 318, 320, 322, 324, 326, 328, 330, 332, 334, 336, 338, 340, 342, 344, 346, 348, 350, 352, 354, 356, 358, 360, 362, 364, 366, 368, 370, 372, 374, 376, 378, 380, 382, 384, 386, 388, 390, 392, 394, 396, 398, 400, 402, 404, 406, 408, 410, 412, 414, 416, 418, 420, 422, 424, 426, 428, 430, 432, 434, 436, 438, 440, 442, 444, 446, 448, 450, 452, 454, 456, 458, 460, 462, 464, 466, 468, 470, 472, 474, 476, 478, 480, 482, 484, 486, 488, 490, 492, 494, 496, 498, 500, 502, 504, 506, 508, 510, 512, 514, 516, 518, 520, 522, 524, 526, 528, 530, 532, 534, 536, 538, 540, 542, 544, 546, 548, 550, 552, 554, 556, 558, 560, 562, 564, 566, 568, 570, 572, 574, 576, 578, 580, 582, 584, 586, 588, 590, 592, 594, 596, 598, 600, 602, 604, 606, 608, 610, 612, 614, 616, 618, 620, 622, 624, 626, 628, 630, 632, 634, 636, 638, 640, 642, 644, 646, 648, 650, 652, 654, 656, 658, 660, 662, 664, 666, 668, 670, 672, 674, 676, 678, 680, 682, 684, 686, 688, 690, 692, 694, 696, 698, 700, 702, 704, 706, 708, 710, 712, 714, 716, 718, 720, 722, 724, 726, 728, 730, 732, 734, 736, 738, 740, 742, 744, 746, 748, 750, 752, or 754.

[0238] In some embodiments, the recombinant polynucleotide comprises a polynucleotide sequence having at least 70%, 75%, 80%, 81%, 82%, 83%, 84%, 85%, 86%, 87%, 88%, 89%, 90%, 91%, 92%, 93%, 94%, 95%, 96%, 97%, 98%, or 99% or more sequence identity to a reference polynucleotide sequence corresponding to nucleotide residues 58-2832 of an odd-numbered SEQ ID NO. of SEQ ID NOs: 13-753, or to a reference polynucleotide sequence corresponding to an odd-numbered SEQ ID NO. of SEQ ID NOs: 13-753, wherein the recombinant polynucleotide encodes an acid alpha-glucosidase.

[0239] In some embodiments, the recombinant polynucleotide comprises a polynucleotide sequence comprising nucleotide residues 58-2832 of an odd-numbered SEQ ID NO. of SEQ ID NOs: 13-753, or a polynucleotide sequence comprising an odd-numbered SEQ ID NO. of SEQ ID NOs: 13-753.

[0240] In some embodiments, the recombinant polynucleotide comprises a polynucleotide sequence comprising nucleotide residues 58-2832 of SEQ ID NO: 13, 15, 17, 19, 21, 23, 25, 27, 29, 31, 33, 35, 37, 39, 41, 43, 45, 47, 49, 51, 53, 55, 57, 59, 61, 63, 65, 67, 69, 71, 73, 75, 77, 79, 81, 83, 85, 87, 89, 91, 93, 95, 97, 99, 101, 103, 105, 107, 109, 111, 113, 115, 117, 119, 121, 123, 125, 127, 129, 131, 133, 135, 137, 139, 141, 143, 145, 147, 149, 151, 153, 155, 157, 159, 161, 163, 165, 167, 169, 171, 173, 175, 177, 179, 181, 183, 185, 187, 189, 191, 193, 195, 197, 199, 201, 203, 205, 207, 209, 211, 213, 215, 217, 219, 221, 223, 225, 227, 229, 231, 233, 235, 237, 239, 241, 243, 245, 247, 249, 251, 253, 255, 257, 259, 261, 263, 265, 267, 269, 271, 273, 275, 277, 279, 281, 283, 285, 287, 289, 291, 293, 295, 297, 299, 301, 303, 305, 307, 309, 311, 313, 315, 317, 319, 321, 323, 325, 327, 329, 331, 333, 335, 337, 339, 341, 343, 345, 347, 349, 351, 353, 355, 357, 359, 361, 363, 365, 367, 369, 371, 373, 375, 377, 379, 381, 383, 385, 387, 389, 391, 393, 395, 397, 399, 401, 403, 405, 407, 409, 411, 413, 415, 417, 419, 421, 423, 425, 427, 429, 431, 433, 435, 437, 439, 441, 443, 445, 447, 449, 451, 453, 455, 457, 459, 461, 463, 465, 467, 469, 471, 473, 475, 477, 479, 481, 483, 485, 487, 489, 491, 493, 495, 497, 499, 501, 503, 505, 507, 509, 511, 513, 515, 517, 519, 521, 523, 525, 527, 529, 531, 533, 535, 537, 539, 541, 543, 545, 547, 549, 551, 553, 555, 557, 559, 561, 563, 565, 567, 569, 571, 573, 575, 577, 579, 581, 583, 585, 587, 589, 591, 593, 595, 597, 599, 601, 603, 605, 607, 609, 611, 613, 615, 617, 619, 621, 623, 625, 627, 629, 631, 633, 635, 637, 639, 641, 643, 645, 647, 649, 651, 653, 655, 657, 659, 661, 663, 665, 667, 669, 671, 673, 675, 677, 679, 681, 683, 685, 687, 689, 691, 693, 695, 697, 699, 701, 703, 705, 707, 709, 711, 713, 715, 717, 719, 721, 723, 725, 727, 729, 731, 733, 735, 737, 739, 741, 743, 745, 747, 749, 751, or 753.

[0241] In some embodiments, the recombinant polynucleotide comprises a polynucleotide sequence comprising SEQ ID NO: 13, 15, 17, 19, 21, 23, 25, 27, 29, 31, 33, 35, 37, 39, 41, 43, 45, 47, 49, 51, 53, 55, 57, 59, 61, 63, 65, 67, 69, 71, 73, 75, 77, 79, 81, 83, 85, 87, 89, 91, 93, 95, 97, 99, 101, 103, 105, 107, 109, 111, 113, 115, 117, 119, 121, 123, 125, 127, 129, 131, 133, 135, 137, 139, 141, 143, 145, 147, 149, 151, 153, 155, 157, 159, 161, 163, 165, 167, 169, 171, 173, 175, 177, 179, 181, 183, 185, 187, 189, 191, 193, 195, 197, 199, 201, 203, 205, 207, 209, 211, 213, 215, 217, 219, 221, 223, 225, 227, 229, 231, 233, 235, 237, 239, 241, 243, 245, 247, 249, 251, 253, 255, 257, 259, 261, 263, 265, 267, 269, 271, 273, 275, 277, 279, 281, 283, 285, 287, 289, 291, 293, 295, 297, 299, 301, 303, 305, 307, 309, 311, 313, 315, 317, 319, 321, 323, 325, 327, 329, 331, 333, 335, 337, 339, 341, 343, 345, 347, 349, 351, 353, 355, 357, 359, 361, 363, 365, 367, 369, 371, 373, 375, 377, 379, 381, 383, 385, 387, 389, 391, 393, 395, 397, 399, 401, 403, 405, 407, 409, 411, 413, 415, 417, 419, 421, 423, 425, 427, 429, 431, 433, 435, 437, 439, 441, 443, 445, 447, 449, 451, 453, 455, 457, 459, 461, 463, 465, 467, 469, 471, 473, 475, 477, 479, 481, 483, 485, 487, 489, 491, 493, 495, 497, 499, 501, 503, 505, 507, 509, 511, 513, 515, 517, 519, 521, 523, 525, 527, 529, 531, 533, 535, 537, 539, 541, 543, 545, 547, 549, 551, 553, 555, 557, 559, 561, 563, 565, 567, 569, 571, 573, 575, 577, 579, 581, 583, 585, 587, 589, 591, 593, 595, 597, 599, 601, 603, 605, 607, 609, 611, 613, 615, 617, 619, 621, 623, 625, 627, 629, 631, 633, 635, 637, 639, 641, 643, 645, 647, 649, 651, 653, 655, 657, 659, 661, 663, 665, 667, 669, 671, 673, 675, 677, 679, 681, 683, 685, 687, 689, 691, 693, 695, 697, 699, 701, 703, 705, 707, 709, 711, 713, 715, 717, 719, 721, 723, 725, 727, 729, 731, 733, 735, 737, 739, 741, 743, 745, 747, 749, 751, or 753.

[0242] In some embodiments, the recombinant polynucleotide encoding any of the engineered acid alpha-glucosidase polypeptides provided herein is manipulated in a variety of ways to provide for expression of the encoded polypeptide. In some embodiments, the polynucleotides encoding the polypeptides are provided as expression vectors where one or more control sequences is present to regulate the expression of the polynucleotides and/or polypeptides. In some embodiments, the control sequences include among other sequences, promoters, Kozak sequence, leader sequences, polyadenylation sequences, pro-peptide sequences, signal peptide sequences, DNA based regulatory elements for gene therapy retention and transcription terminators. Manipulation of the isolated polynucleotide prior to its insertion into a vector may be desirable or necessary depending on the expression vector. The techniques for modifying polynucleotides and nucleic acid sequences utilizing recombinant DNA methods are well-known in the art.

[0243] In some embodiments, suitable promoters can be selected based on the host cells used for expression. For bacterial host cells, suitable promoters for directing transcription of the nucleic acid constructs of the present disclosure, include, but are not limited to promoters obtained from the E. coli lac operon, Streptomyces coelicolor agarase gene (dagA), Bacillus subtilis levansucrase gene (sacB), Bacillus licheniformis alpha-amylase gene (amyL), Bacillus stearothermophilus maltogenic amylase gene (amyM), Bacillus amyloliquefaciens alpha-amylase gene (amyQ), Bacillus licheniformis penicillinase gene (penP), Bacillus subtilis xylA and xylB genes, and prokaryotic beta-lactamase gene (see, e.g., Villa-Kamaroff et al., Proc. Natl Acad. Sci. USA, 1978, 75:3727-3731), as well as the tac promoter (see, e.g., DeBoer et al., Proc. Natl Acad. Sci. USA, 1983, 80:21-25). Exemplary promoters for filamentous fungal host cells, include, but are not limited to promoters obtained from the genes for Aspergillus oryzae TAKA amylase, Rhizomucor miehei aspartic proteinase, Aspergillus niger neutral alpha-amylase, Aspergillus niger acid stable alpha-amylase, Aspergillus niger or Aspergillus awamori glucoamylase (glaA), Rhizomucor miehei lipase, Aspergillus oryzae alkaline protease, Aspergillus oryzae triose phosphate isomerase, Aspergillus nidulans acetamidase, and Fusarium oxysporum trypsin-like protease (see, e.g., WO 96/00787), as well as the NA2-tpi promoter (a hybrid of the promoters from the genes for Aspergillus niger neutral alpha-amylase and Aspergillus oryzae triose phosphate isomerase), and mutant, truncated, and hybrid promoters thereof. Exemplary yeast cell promoters can be from the genes for Saccharomyces cerevisiae enolase (ENO-1), Saccharomyces cerevisiae galactokinase (GAL1), Saccharomyces cerevisiae alcohol dehydrogenase/glyceraldehyde-3-phosphate dehydrogenase (ADH2/GAP), and Saccharomyces cerevisiae 3-phosphoglycerate kinase. Other useful promoters for yeast host cells are known in the art (see, e.g., Romanos et al., Yeast, 1992, 8:423-488). Exemplary promoters for use in mammalian cells include, but are not limited to those from cytomegalovirus (CMV), chicken β-actin promoter fused with the CMV enhancer, Simian virus 40 (SV40), from Homo sapiens phosphoglycerate kinase, beta actin, elongation factor-1a or glyceraldehyde-3-phosphate dehydrogenase, or from Gallus β-actin.

[0244] In some embodiments, the control sequence is a suitable transcription terminator sequence, a sequence recognized by a host cell to terminate transcription. The terminator sequence is operably linked to the 3′ terminus of the nucleic acid sequence encoding the polypeptide. Any terminator which is functional in the host cell of choice finds use in the present invention. For bacterial expression, the transcription terminators can be a Rho-dependent terminators that rely on a Rho transcription factor, or a Rho-independent, or intrinsic terminators, which do not require a transcription factor. Exemplary bacterial transcription terminators are described in Peters et al., J Mol Biol., 2011, 412(5):793-813. Exemplary transcription terminators for filamentous fungal host cells can be obtained from the genes for Aspergillus oryzae TAKA amylase, Aspergillus niger glucoamylase, Aspergillus nidulans anthranilate synthase, Aspergillus niger alpha-glucosidase, and Fusarium oxysporum trypsin-like protease. Exemplary terminators for yeast host cells can be obtained from the genes for Saccharomyces cerevisiae enolase, Saccharomyces cerevisiae cytochrome C (CYC1), and Saccharomyces cerevisiae glyceraldehyde-3-phosphate dehydrogenase. Other useful terminators for yeast host cells are known in the art (See e.g., Romanos et al., supra). Exemplary terminators for mammalian cells include, but are not limited to, those from cytomegalovirus (CMV), Simian vacuolating virus 40 (SV40), from Homo sapiens growth hormone hGH, from bovine growth hormone BGH, and from human or rabbit beta globulin.

[0245] In some embodiments, the control sequence is a suitable leader sequence, 5′-cap modification, 5′ UTR, etc. In some embodiments, these regulatory sequence elements mediate binding to molecules involved in mRNA trafficking and translation, inhibit 5′-exonucleolytic degradation and confer resistance to de-capping. The leader sequence is operably linked to the 5′ terminus of the nucleic acid sequence encoding the polypeptide. Any leader sequence that is functional in the host cell of choice may be used. Exemplary leaders for filamentous fungal host cells are obtained from the genes for Aspergillus oryzae TAKA amylase and Aspergillus nidulans triose phosphate isomerase. Suitable leaders for yeast host cells include, but are not limited to those obtained from the genes for Saccharomyces cerevisiae enolase (ENO-1), Saccharomyces cerevisiae 3-phosphoglycerate kinase, Saccharomyces cerevisiae alpha-factor, and Saccharomyces cerevisiae alcohol dehydrogenase/glyceraldehyde-3-phosphate dehydrogenase (ADH2/GAP). Suitable leaders for mammalian host cells include but are not limited to the 5′-UTR element present in orthopoxvirus mRNA.

[0246] In some embodiments, the control sequence comprises a 3′ untranslated nucleic acid region and polyadenylation tail nucleic acid sequence, sequences operably linked to the 3′ terminus of the protein coding nucleic acid sequence which mediate binding to proteins involved in mRNA trafficking and translation and mRNA half-life. Any polyadenylation sequence and 3′ UTR which is functional in the host cell of choice may be used in the present invention. Exemplary polyadenylation sequences for filamentous fungal host cells include, but are not limited to those from the genes for Aspergillus oryzae TAKA amylase, Aspergillus niger glucoamylase, Aspergillus nidulans anthranilate synthase, Fusarium oxysporum trypsin-like protease, and Aspergillus niger alpha-glucosidase. Useful polyadenylation sequences for yeast host cells are also known in the art (See e.g., Guo and Sherman, Mol. Cell. Biol., 1995, 15:5983-5990). Useful polyadenylation and 3′ UTR sequences for mammalian host cells include, but are not limited to the 3′-UTRs of α- and β-globin mRNAs that harbor several sequence elements that increase the stability and translation of mRNA.

[0247] In some embodiments, the control sequence is a signal peptide coding region that codes for an amino acid sequence linked to the amino terminus of a polypeptide and directs the encoded polypeptide into the cell's secretory pathway. The 5′ end of the coding sequence of the nucleic acid sequence may inherently contain a signal peptide coding region naturally linked in translation reading frame with the segment of the coding region that encodes the secreted polypeptide. Alternatively, the 5′ end of the coding sequence may contain a signal peptide coding region that is foreign to the coding sequence. Any signal peptide coding region that directs the expressed polypeptide into the secretory pathway of a host cell of choice finds use for expression of the engineered acid alpha-glucosidase polypeptides provided herein. Effective signal peptide coding regions for filamentous fungal host cells include, but are not limited to the signal peptide coding regions obtained from the genes for Aspergillus oryzae TAKA amylase, Aspergillus niger neutral amylase, Aspergillus niger glucoamylase, Rhizomucor miehei aspartic proteinase, Humicola insolens cellulase, and Humicola lanuginosa lipase. Useful signal peptides for yeast host cells include, but are not limited to those from the genes for Saccharomyces cerevisiae alpha-factor and Saccharomyces cerevisiae invertase. Useful signal peptides for mammalian host cells include but are not limited to those from the genes for immunoglobulin gamma (IgG). In some embodiments, the signal peptide comprises the naturally occurring signal sequence in human acid alpha-glucosidase. In some embodiments, the encoded signal peptide comprises a sequence comprising residues 1-19 of SEQ ID NO: 2 or 12.

[0248] In some embodiments, the control sequence comprises one or more regulatory sequences that facilitate regulation of the expression of the polynucleotide and/or corresponding encoded polypeptide relative to the growth of the host cell. Examples of regulatory systems are those that cause the expression of the gene to be turned on or off in response to a chemical or physical stimulus, including the presence of a regulatory compound. In prokaryotic host cells, suitable regulatory sequences include, but are not limited to the lac, tac, and trp operator systems. In yeast host cells, suitable regulatory systems include, but are not limited to the ADH2 system or GAL1 system. In filamentous fungi, suitable regulatory sequences include, but are not limited to the TAKA alpha-amylase promoter, Aspergillus niger glucoamylase promoter, and Aspergillus oryzae glucoamylase promoter. Exemplary inducible promoters regulated by exogenous agents include the zinc-inducible sheep metallothionine (MT) promoter, dexamethasone (Dex)-inducible promoter, mouse mammary tumor virus (MMTV) promoter; ecdysone insect promoter, tetracycline-inducible promoter system, RU486-inducible promoter system, and the rapamycin-inducible promoter system.

[0249] In some embodiments, the recombinant expression vector may be any suitable vector (e.g., a plasmid or virus, including but not limited to adenovirus (AV), adeno-associated virus (AAV), lentivirus (LV), and non-viral vectors, such as liposomes and exosome), that can be conveniently subjected to recombinant DNA procedures and can result in the expression of the engineered acid alpha-glucosidase polynucleotide sequence. The choice of the vector will typically depend on the compatibility of the vector with the host cell into which the vector is to be introduced. The vectors may be linear or closed circular plasmids.

[0250] In some embodiments, the expression vector is an autonomously replicating vector (i.e., a vector that exists as an extra-chromosomal entity, the replication of which is independent of chromosomal replication, such as a plasmid, an extra-chromosomal element, a minichromosome, or an artificial chromosome). The vector may contain any means for assuring self-replication. In some alternative embodiments, the vector may be one which, when introduced into the host cell, is integrated into the genome and replicated together with the chromosome(s) into which it has been integrated. In some embodiments, the vector is a non-replicating and non-integrating vector, which may exist episomally. Furthermore, a single vector or plasmid or two or more vectors or plasmids which together contain the total DNA to be introduced into the genome of the host cell, or a transposon may be used.

[0251] In some embodiment, the recombinant polynucleotides may be provided on a non-replicating expression vector or plasmid. In some embodiments, the non-replicating expression vector or plasmid can be based on viral vectors defective in replication (see, e.g., Travieso et al., npj Vaccines, 2022, Vol. 7, Article 75).

[0252] In some embodiments, the expression vector contains one or more selectable markers, which permit easy selection of transformed cells. A “selectable marker” is a gene, the product of which provides for biocide or viral resistance, resistance to heavy metals, prototrophy to auxotrophs, and the like. Examples of bacterial selectable markers include, but are not limited to the dal genes from Bacillus subtilis or Bacillus licheniformis, or markers, which confer antibiotic resistance such as ampicillin, kanamycin, chloramphenicol, or tetracycline resistance. Suitable markers for yeast host cells include, but are not limited to ADE2, HIS3, LEU2, LYS2, MET3, TRP1, and URA3. Selectable markers for use in filamentous fungal host cells include, but are not limited to, amdS (acetamidase; e.g., from A. nidulans or A. orzyae), argB (ornithine carbamoyltransferases), bar (phosphinothricin acetyltransferase; e.g., from S. hygroscopicus), hph (hygromycin phosphotransferase), niaD (nitrate reductase), pyrG (orotidine-5′-phosphate decarboxylase; e.g., from A. nidulans or A. orzyae), sC (sulfate adenyltransferase), and trpC (anthranilate synthase), as well as equivalents thereof. Selectable marker for mammalian cells include, but are not limited to, chloramphenicol acetyl transferase (CAT), nourseothricin N-acetyl transferase, blasticidin-S deaminase, blastcidin S acetyltransferase, Sh ble (Zeocin® resistance), aminoglycoside 3′-phosphotransferase (neomycin resistance), hph (hygromycin resistance), thymidine kinase, and puromycin N-acetyl-transferase.

[0253] In another aspect, the present disclosure provides a host cell comprising a recombinant polynucleotide encoding an engineered acid alpha-glucosidase polypeptide described herein, the polynucleotide being operably linked to one or more control sequences for expression of the engineered acid alpha-glucosidase polypeptides(s) in the host cell. In some embodiments, the host cell is a prokaryotic or eukaryotic cell. In some embodiments, the host cell is a mammalian cell. In some embodiments, the host cell is a human cell. In some embodiments, the host cell is a cell deficient in acid alpha-glucosidase activity or a cell obtained from a subject with Pompe disease.

[0254] Host cells for use in expressing the polypeptides encoded by the expression vectors of the present disclosure are known in the art and include but are not limited to, fungal cells, such as yeast cells (e.g., Saccharomyces cerevisiae and Pichia pastoris (e.g., ATCC Accession No. 201178)); insect cells (e.g., Drosophila S2 and Spodoptera Sf9 cells), plant cells, animal cells (e.g., CHO, CHO-K1, COS, and BHK), and human cells (e.g., HEK293T, human fibroblast, THP-1, Jurkat and Bowes melanoma cell lines). In some embodiments, the host cells are cells obtained from mammals, including model animals or human patients deficient in acid alpha-glucosidase activity. In some embodiments, the host cells for expression are cells obtained from human patients diagnosed with Pompe disease.

[0255] In another aspect, the present disclosure provides a method for producing the engineered acid alpha-glucosidase polypeptide, where the method comprises culturing a host cell capable of expressing a polynucleotide encoding the engineered acid alpha-glucosidase polypeptide under conditions suitable for expression of the polypeptide such that the engineered acid alpha-glucosidase polypeptide is produced. In some embodiments, the method further comprises the step of isolating the engineered acid alpha-glucosidase polypeptides, such as from media and/or cells. In some embodiments, the method further comprises purifying the expressed engineered acid alpha-glucosidase, as described herein.

[0256] Appropriate culture media and growth conditions for the above-described host cells are known in the art. Polynucleotides for expression of the engineered acid alpha-glucosidase polypeptides may be introduced into cells by various methods known in the art. Techniques include, among others, electroporation, biolistic particle bombardment, liposome mediated transfection, calcium chloride transfection, and protoplast fusion.

[0257] In some embodiments, the engineered acid alpha-glucosidase polypeptides with the properties disclosed herein can be obtained by subjecting the polynucleotide encoding the naturally occurring or engineered acid alpha-glucosidase polypeptide to mutagenesis and/or directed evolution methods known in the art, and as described herein. An exemplary directed evolution technique is mutagenesis and/or DNA shuffling (See e.g., Stemmer, Proc. Natl. Acad. Sci. USA, 1994, 91:10747-10751; WO 95/22625; WO 97/0078; WO 97/35966; WO 98/27230; WO 00/42651; WO 01/75767 and U.S. Pat. No. 6,537,746). Other directed evolution procedures that can be used include, among others, staggered extension process (StEP), in vitro recombination (See e.g., Zhao et al., Nat. Biotechnol., 1998, 16:258-261), mutagenic PCR (See e.g., Caldwell et al., PCR Methods Appl., 1994, 3:S136-S140), and cassette mutagenesis (See e.g., Black et al., Proc. Natl. Acad. Sci. USA, 1996, 93:3525-3529).

[0258] The mutagenesis and directed evolution methods can be applied to polynucleotides to generate variant libraries that can be expressed, screened, and assayed. Any suitable mutagenesis and directed evolution methods find use in the present disclosure (See e.g., U.S. Pat. Nos. 5,605,793, 5,811,238, 5,830,721, 5,834,252, 5,837,458, 5,928,905, 6,096,548, 6,117,679, 6,132,970, 6,165,793, 6,180,406, 6,251,674, 6,277,638, 6,287,861, 6,287,862, 6,291,242, 6,297,053, 6,303,344, 6,309,883, 6,319,713, 6,319,714, 6,323,030, 6,326,204, 6,335,160, 6,335,198, 6,344,356, 6,352,859, 6,355,484, 6,358,740, 6,358,742, 6,365,377, 6,365,408, 6,368,861, 6,372,497, 6,376,246, 6,379,964, 6,387,702, 6,391,552, 6,391,640, 6,395,547, 6,406,855, 6,406,910, 6,413,745, 6,413,774, 6,420,175, 6,423,542, 6,426,224, 6,436,675, 6,444,468, 6,455,253, 6,479,652, 6,482,647, 6,489,146, 6,506,602, 6,506,603, 6,519,065, 6,521,453, 6,528,311, 6,537,746, 6,573,098, 6,576,467, 6,579,678, 6,586,182, 6,602,986, 6,613,514, 6,653,072, 6,716,631, 6,946,296, 6,961,664, 6,995,017, 7,024,312, 7,058,515, 7,105,297, 7,148,054, 7,288,375, 7,421,347, 7,430,477, 7,534,564, 7,620,500, 7,620,502, 7,629,170, 7,702,464, 7,747,391, 7,747,393, 7,751,986, 7,776,598, 7,783,428, 7,795,030, 7,853,410, 7,868,138, 7,873,499, 7,904,249, 7,957,912, 8,383,346, 8,504,498, 8,849,575, 8,876,066, 8,768,871, 9,593,326, and all related non-US counterparts; Ling et al., Anal. Biochem., 1997, 254(2):157-78; Dale et al., Meth. Mol. Biol., 1996, 57:369-74; Smith, Ann. Rev. Genet., 1985, 19:423-462; Botstein et al., Science, 1985, 229:1193-1201; Carter, Biochem. J., 1986, 237:1-7; Kramer et al., Cell, 1984, 38:879-887; Wells et al., Gene, 1985, 34:315-323; Minshull et al., Curr. Op. Chem. Biol., 1999, 3:284-290; Christians et al., Nat. Biotechnol., 1999, 17:259-264; Crameri et al., Nature, 1998, 391:288-291; Crameri, et al., Nat. Biotechnol., 1997, 15:436-438; Zhang et al., Proc. Nat. Acad. Sci. U.S.A., 1997, 94:4504-4509; Crameri et al., Nat. Biotechnol., 1996, 14:315-319; Stemmer, Nature, 1994, 370:389-391; Stemmer, Proc. Nat. Acad. Sci. USA, 1994, 91:10747-10751; US Pat. Appln. Publn. Nos. 2008/0220990, US 2009/0312196, US2014/0005057, US2014/0214391, US2014/0221216; US2015/0050658, US2015/0133307, US2015/0134315 and all related non-US counterparts; WO 95/22625, WO 97/0078, WO 97/35966, WO 98/27230, WO 00/42651, WO 01/75767, and WO 2009/152336; all of which are incorporated herein by reference).

[0259] In some embodiments, the polypeptide variants obtained following mutagenesis treatment are screened by subjecting the polypeptide variants to an assay condition, such as defined temperature, acid or basic pH, serum/plasma exposure, and measuring the amount of polypeptide activity remaining after treatments or other assay conditions. DNA containing the polynucleotide encoding the engineered acid alpha-glucosidase polypeptide is then isolated from the host cell, sequenced to identify the nucleotide sequence changes (if any), and used to express the protein in a different or the same host cell. Measuring activity from the expression libraries can be performed using any suitable method known in the art and as provided in the Examples.

[0260] For engineered polypeptides of known sequence, the polynucleotides encoding the polypeptide can be prepared by standard solid-phase methods, according to known synthetic methods. In some embodiments, polynucleotide fragments can be individually synthesized, then joined (e.g., by enzymatic or chemical litigation methods, or polymerase mediated methods) to form any desired continuous sequence. For example, polynucleotides and oligonucleotides disclosed herein can be prepared by chemical synthesis using the classical phosphoramidite method (See e.g., Beaucage et al., Tetra. Lett., 1981, 22:1859-69; and Matthes et al., EMBO J., 1984, 3:801-05), as it is typically practiced in automated synthetic methods. According to the phosphoramidite method, oligonucleotides are synthesized (e.g., in an automatic DNA synthesizer), purified, annealed, ligated and cloned in appropriate vectors.

[0261] Accordingly, in some embodiments, a method for preparing the engineered acid alpha-glucosidase polypeptide can comprise: (a) synthesizing a polynucleotide encoding an engineered acid alpha-glucosidase, for example an amino acid sequence of any variant provided in Table 3-1, as well as an even-numbered SEQ ID NO. of SEQ ID NOs: 14-754, and (b) expressing the engineered acid alpha-glucosidase polypeptide encoded by the polynucleotide. In some embodiments, the amino acid sequence has optionally 1-2, 1-3, 1-4, 1-5, 1-6, 1-7, 1-8, 1-9, 1-10, 1-15, 1-20, 1-21, 1-22, 1-23, 1-24, 1-25, 1-30, 1-35, 1-40, 1-45, or 1-50 amino acid residue deletions, insertions and/or substitutions. In some embodiments, the amino acid sequence has optionally 1, 2, 3, 4, 5, 6, 7, 8, 9, 10, 11, 12, 13, 14, 15, 16, 17, 18, 19, 20, 21, 22, 23, 24, 25, 30, 30, 35, 40, 45, or 50 amino acid residue deletions, insertions and/or substitutions. In some embodiments, the amino acid sequence has optionally 1, 2, 3, 4, 5, 6, 7, 8, 9, 10, 11, 12, 13, 14, 15, 16, 18, 20, 21, 22, 23, 24, or 25 amino acid residue deletions, insertions and/or substitutions. In some embodiments, the substitutions are conservative or non-conservative substitutions.

[0262] The expressed engineered acid alpha-glucosidase polypeptide can be assessed for any desired improved property (e.g., activity/potency, stability, serum/plasma stability, basic pH tolerance, acid pH tolerance, cellular uptake, etc.), using any suitable assay known in the art, including but not limited to the assays and conditions described herein.

### Compositions

[0263] In a further aspect, the present disclosure provides compositions comprising an engineered acid alpha-glucosidase or a recombinant polynucleotide encoding the acid alpha-glucosidase, including but not limited to those compositions described below. In some embodiments, the composition comprises at least an engineered acid alpha-glucosidase or a recombinant polynucleotide exemplified in Tables 3-1 and 4-1, and the Sequence Listing.

[0264] Depending on the composition and mode of administration, compositions comprising an engineered acid alpha-glucosidase described herein are in the form of a solid, semi-solid, or liquid. In some embodiments, the compositions include other pharmaceutically acceptable components such as diluents, buffers, excipients, salts, emulsifiers, preservatives, stabilizers, fillers, and other ingredients. In some embodiments, compositions comprising the engineered acid alpha-glucosidase polypeptides of the present disclosure include one or more commonly used carrier compounds, including but not limited to sugars (e.g., lactose, sucrose, mannitol, and/or sorbitol), starches, cellulose (e.g., methyl cellulose, hydroxypropylmethyl cellulose, sodium carboxy-methylcellulose), gums (e.g., arabic, tragacanth, guar, etc.), and/or proteins (e.g., gelatin, collagen, etc.). Details on techniques for formulation and administration are available in the art and described in the literature.

[0265] In some embodiments, the engineered acid alpha-glucosidase polypeptides are formulated for use in a pharmaceutical composition. In some embodiments, the pharmaceutical composition further comprises a pharmaceutically acceptable carrier and/or excipient. Any suitable format for use in delivering an engineered acid alpha-glucosidase polypeptides find use herein, including but not limited to pills, tablets, gel tabs, capsules, lozenges, dragees, powders, soft gels, sol-gels, gels, emulsions, implants, patches, sprays, ointments, liniments, creams, pastes, jellies, paints, aerosols, chewing gums, demulcents, sticks, solutions, suspensions (including but not limited to oil-based suspensions, oil-in water emulsions, etc.), slurries, syrups, controlled release formulations, etc. In some embodiments, the engineered acid alpha-glucosidase polypeptides are provided in a format suitable for injection or infusion (i.e., in an injectable formulation), particularly for parenteral administration or infusion into a patient, particularly a human patient.

[0266] In some embodiments, the engineered acid alpha-glucosidase polypeptides are provided in biocompatible matrices such as sol-gels, including silica-based (e.g., oxysilane) sol-gels. In some embodiments, the engineered acid alpha-glucosidase polypeptides are encapsulated. In some alternative embodiments, the engineered acid alpha-glucosidase polypeptides are encapsulated in nanostructures (e.g., nanotubes, nanotubules, nanocapsules, or microcapsules, microspheres, liposomes, etc.). It is intended that the engineered acid alpha-glucosidase polypeptides be administered by any suitable means known in the art, including but not limited to parenteral (e.g., intravenous, intramuscular, subcutaneous, etc.), oral, topical, transdermal, intranasal, intraocular, intrathecal, via implants, etc.

[0267] In some embodiments, the engineered acid alpha-glucosidase polypeptides are chemically modified by glycosylation, chemical crosslinking reagents, pegylation (i.e., modified with polyethylene glycol [PEG] or activated PEG, etc.) or other compounds (See e.g., Ikeda, Amino Acids, 2005, 29:283-287; U.S. Pat. Nos. 7,531,341, 7,534,595, and 7,560,263; US Pat. Publication Nos. 2013/0039898, 2012/0177722, etc.).

[0268] In some additional embodiments, the engineered acid alpha-glucosidase polypeptides are provided in formulations comprising matrix-stabilized enzyme crystals. In some embodiments, the formulation comprises a cross-linked crystalline engineered acid alpha-glucosidase enzyme and a polymer with a reactive moiety that adheres to the enzyme crystals. The present invention also provides engineered acid alpha-glucosidase polypeptides in polymers.

[0269] In some embodiments, compositions comprising the engineered acid alpha-glucosidase polypeptides include one or more commonly used carrier compounds, including but not limited to sugars (e.g., lactose, sucrose, mannitol, and/or sorbitol), starches (e.g., corn, wheat, rice, potato, or other plant starch), cellulose (e.g., methyl cellulose, hydroxypropylmethyl cellulose, sodium carboxy-methylcellulose), gums (e.g., arabic, tragacanth, guar, etc.), and/or proteins (e.g., gelatin, collagen, etc.).

[0270] Additional components in oral formulations may include coloring and or sweetening agents (e.g., glucose, sucrose, and mannitol) and lubricating agents (e.g., magnesium stearate), as well as enteric coatings (e.g., methacrylate polymers, hydroxyl propyl methyl cellulose phthalate, and/or any other suitable enteric coating known in the art). In some embodiments, disintegrating or solubilizing agents are included (e.g., cross-linked polyvinyl pyrrolidone, agar, alginic acid or salts thereof, such as sodium alginate). In some embodiments, the engineered acid alpha-glucosidase polypeptide are be combined with various additional components, including but not limited to preservatives, suspending agents, thickening agents, wetting agents, alcohols, fatty acids, and/or emulsifiers, particularly in liquid formulations. In some embodiments, the engineered acid alpha-glucosidase polypeptides are administered to subjects in combination with other compounds, molecules, and/or materials used in the treatment of Pompe disease, including but not limited to pharmacological chaperones, as well as any other suitable compounds.

[0271] In some embodiments, the pharmaceutical composition comprises a recombinant polynucleotide encoding an engineered acid alpha-glucosidase described herein. In some embodiments, the recombinant polynucleotide is DNA or mRNA. In some embodiments, the pharmaceutical composition further comprises a pharmaceutically acceptable carrier and/or excipient suitable for administration of the recombinant polynucleotide. In some embodiments, the pharmaceutical composition comprising a recombinant polynucleotide encoding an engineered acid alpha-glucosidase is suitable for any suitable means for administration, including, among others, intravenous, intramuscular, subcutaneous, oral, intranasal, intraocular, intrathecal, inhalation, and the like.

[0272] In some additional embodiments, the recombinant polynucleotide encoding the engineered acid alpha-glucosidase polypeptides are provided for delivery to cells or tissues via gene therapy, including viral delivery vectors, including, among others, adenovirus (AV), adeno-associated virus (AAV), and lentivirus (LV). In some embodiments, the recombinant polynucleotide encoding the engineered acid alpha-glucosidase is provided for delivery in non-viral vectors or formulations, including, among others, liposomes, nanotubes, nanotubules, nanocapsules, or microcapsules, and microspheres. In some embodiments, the recombinant polynucleotide encoding the engineered acid alpha-glucosidase polypeptides are provided for delivery to cells or tissues via mRNA therapy following formulation of polyribonucleotide sequences in an encapsulated delivery, such as liposomes, or as lipid nanoparticles (see, e.g., Hou et al., Nature Reviews Materials, 2021, 6:1078-1094).

[0273] In some additional embodiments, the engineered acid alpha-glucosidase polypeptides are provided for delivery to cells or tissues via cell therapy, where the polynucleotide sequence encoding the engineered acid alpha-glucosidase polypeptides is introduced into exogenous cell and that cell (or cells) are introduced into a recipient (e.g., a patient exhibiting or at risk for developing Pompe disease). Exemplary cells that may be used include, among others, hematopoietic (blood-forming), stem cells (HSC), skeletal muscle stem cells, and mesenchymal stem cells.

### Uses and Methods

[0274] In a further aspect, the present disclosure provide use of the engineered acid alpha-glucosidase polypeptides, recombinant polynucleotides encoding the engineered acid alpha-glucosidase, or compositions thereof for treating a subject with a deficiency in acid alpha-glucosidase activity. In some embodiments, the engineered acid alpha-glucosidase polypeptides, the recombinant polynucleotides, or compositions thereof, are used for treating one or more symptoms associated with a deficiency in acid alpha-glucosidase activity. In some embodiments, the engineered acid alpha-glucosidase polypeptides, recombinant polynucleotides, or compositions thereof are used for treating a subject with Pompe disease.

[0275] In some embodiments, a method for treating and/or preventing the symptoms of a deficiency in acid alpha-glucosidase activity comprises providing to a subject in need thereof an effective amount of an engineered acid alpha-glucosidase described herein. In some embodiments, an effective amount of an engineered acid alpha-glucosidase or a pharmaceutical composition thereof is administered to the subject. In some embodiments, the engineered acid alpha-glucosidase is administered about 1 mg/kg to about 100 mg/kg. In some embodiments, the engineered acid alpha-glucosidase is administered about 10 mg/kg to about 60 mg/kg. In some embodiments, the engineered acid alpha-glucosidase is administered about 20 mg/kg to about 40 mg/kg.

[0276] In some embodiments, a recombinant polynucleotide encoding an engineered acid alpha-glucosidase, or a pharmaceutical composition thereof, is administered to a subject. In some embodiments, the recombinant polynucleotide encoding an engineered acid alpha-glucosidase, or a pharmaceutical composition thereof, is administered at a therapeutically effective amount. In some embodiments, the recombinant polynucleotide encoding the engineered acid alpha-glucosidase, or pharmaceutical compositions thereof, is administered intravenously, intramuscularly, subcutaneously, intranasally, intraocularly, intrathecally, inhalation, orally, and the like.

[0277] In some embodiments, the subject for treatment is afflicted with Pompe disease. In some embodiments, the symptoms of Pompe disease are ameliorated. In some embodiments, the subject for treatment is an infant or child. In some embodiments, the subject for treatment is an adult or young adult.

[0278] In some embodiments, the present disclosure also provides a use of the engineered acid alpha-glucosidase in the preparation of a medicament for treating a deficiency in acid alpha-glucosidase in a subject. In some embodiments, the present disclosure provides for use of a recombinant polynucleotide encoding an engineered acid alpha-glucosidase in the preparation of a medicament for treating a deficiency in acid alpha-glucosidase activity in a subject. In some embodiments, a condition involving a deficiency in acid alpha-glucosidase is Pompe disease.

[0279] The foregoing and other aspects of the invention may be better understood in connection with the following non-limiting examples. The examples are provided for illustrative purposes only and are not intended to limit the scope of the present invention in any way.

### EXAMPLES

[0280] In the experimental disclosure below, the following abbreviations apply: ppm (parts per million); M (molar); mM (millimolar), uM and μM (micromolar); nM (nanomolar); mol (moles); gm and g (gram); mg (milligrams); ug and μg (micrograms); L and 1 (liter); ml and mL (milliliter); ul, μl, uL, μL (microliter); cm (centimeters); mm (millimeters); um and μm (micrometers); sec. (seconds); min(s) (minute(s)); h(s) and hr(s) (hour(s)); U (units); MW (molecular weight); rpm (rotations per minute); ° C. (degrees Celsius); CDS (coding sequence); DNA (deoxyribonucleic acid); RNA (ribonucleic acid); E. coli W3110 (commonly used laboratory E. coli strain, available from the Coli Genetic Stock Center [CGSC], New Haven, CT); DPBS (Dulbecco's phosphate buffered saline); LB (Luria-Burtani); TB (terrific broth); 4-MUGlu or 4-MU-GLU (4-methylumbelliferyl α-D-glucopyranoside; SD-Ura (single drop out medium without uracil); HPLC (high pressure liquid chromatography); SDS-PAGE (sodium dodecyl sulfate polyacrylamide gel electrophoresis); MU-Glu (4-methylumbelliferyl α-D-glucopyranoside); IPTG (isopropyl β-D-1-thiogalactopyranoside); PMBS (polymyxin B sulfate); FIOPC (fold improvements over positive control); PBMC (peripheral blood mononuclear cells); LB (Luria broth); and MeOH (methanol).

### Example 1

### GAA Gene Acquisition and Construction of Expression Vectors

[0281] This example describes GAA gene acquisition and expression vector construction. A synthetic gene coding for a WT human GAA (Uniprot ID P10253) was designed for optimized gene expression in Homo sapiens (SEQ ID NO: 1) and cloned into the expression vector pDH (see International patent publication WO2021127457). For secreted expression and transient transfection in mammalian cells, a chimeric GAA expression construct encoding the synthetic mouse IG signal peptide (residues 1-19 of Uniprot accession number: AON1R5) fused to a synthetic gene coding for the different GAA variants was generated as follows. Oligonucleotides containing restriction enzyme flanks to enable cloning into either the BamHI/XhoI site or HindIII/XhoI site were used to amplify a fragment coding for the synthetic mouse IG signal peptide and the coding sequence for the mature form of GAA. Acid alpha-glucosidase variants SEQ ID NO: 3, 7, 5, 13, 9 were cloned into pDH or pcDNA3.1(+). Directed evolution was used to generate specific gene variants derived from SEQ ID NO: 11 (disclosed in WO2021127457 as SEQ ID NO: 3103 for polynucleotide sequence and SEQ ID NO: 3104 for polypeptide sequence) within the pDH plasmid construct (see e.g., U.S. Pat. No. 8,383,346 and WO2010/144103).

### Example 2

### High-Throughput Growth of Suspension Mammalian Cells and GAA Assays Obtained Through Suspension Mammalian Expression

### High-Throughput (HTP) Growth of GAA and GAA Variants in Suspension Mammalian Cells (Expi293F)

[0282] EXPI293F™ cells (ThermoFisher Scientific) were transfected with polynucleotides encoding wild-type GAA or GAA variants having a synthetic mouse IG signal peptide fusion using the lipofection method with EXPIFECTAMINE™ 293 Reagent (ThermoFisher Scientific) in EXPI293™ Expression Medium (ThermoFisher Scientific). EXPI293F™ cells (ThermoFisher Scientific) were cultured in EXPI293™ Expression Medium (ThermoFisher Scientific) and seeded into Axygen 1.1 mL deep well plate (Corning, P-DW-11-C-S), at densities of 1×10⁶ cells/well/400 μL. Cells were subjected to lipofection-mediated transfection and returned to a shaking incubator with 8% CO₂ and 70% humidity for 3-4 days to allow for expression and secretion of GAA variants into the conditioned media. Conditioned media was harvested by centrifugation of expression plates and transfer of conditioned media into a BioRad Hardshell PCR Plate (BioRad, HSP9601). Plates were centrifuged again and clarified conditioned media was transferred into new 96-well plates for activity, stability or uptake into cell analysis.

### HTP-Analysis of Supernatants

[0283] GAA variant activity was determined by measuring the hydrolysis of 4-methylumbelliferyl α-D-glucopyranoside (4-MU-GLU). For the unchallenged assay, 5 μL of EXPI293F™ clarified conditioned media produced as described above was mixed with 50 μL of 1.5 mM 4-MU-GLU in McIlvaine Buffer (McIlvaine, J. Biol. Chem., 1921, 49:183-186), pH 4.4, in a 96-well, black, opaque bottom plate. The reactions were incubated at 25° C. for 15 minutes with agitation at 400 rpm, prior to quenching with 100 μL of 0.5M sodium carbonate pH 10.5. Hydrolysis was analyzed using an EnVision microplate reader (Perkin Elmer) monitoring fluorescence (Ex. 355 nm, Em. 460 nm). Unchallenged activity FIOPC was calculated by dividing normalized GAA variant by the activity of the reference polypeptide with the indicated SEQ ID NO.

HTP-Analysis of Supernatants Challenged with Plasma

[0284] GAA variants were challenged with plasma to simulate the conditions that the variants encounter in the blood following their administration to a patient. First, 30 μL of GAA variants in EXPI293F™ clarified conditioned media were combined with 30 μL of plasma (Innovative Research, Innovative Grade US Origin Monkey Cynomolgus Plasma K2 EDTA) in a 96-well plate. The plates were sealed and incubated at 37° C. with agitation at 400 rpm for 4 hours. Next, 10 μL of plasma-challenged sample were mixed with 50 μL of 1.5 mM 4-MU-GLU in McIlvaine buffer, pH 4.4. The reactions were incubated at 25-37° C. for 30 minutes with agitation at 400 rpm, prior to quenching with 100 μL of 0.5M sodium carbonate pH 10.5. Hydrolysis was analyzed using an EnVision microplate reader (Perkin Elmer) monitoring fluorescence (Ex. 355 nm, Em. 460 nm). Plasma stability FIOPC was calculated by dividing normalized GAA variant activity following challenge by the activity of the reference polypeptide with the indicated SEQ ID NO following challenge.

### HTP-Analysis of GAA Activity in Lysates of Pompe Fibroblasts

[0285] GAA variants from HTP EXPI293F™ expression in clarified conditioned media were incubated with target cells and assayed for residual intracellular activity after 72 hours. For these experiments, mammalian cells lacking functional GAA activity were used, namely Pompe patient-derived fibroblasts (Coriell Institute for Medical Research, #GM00248). Pompe patient-derived fibroblasts were seeded into 96-well plates COSTAR® (3904, Corning) and allowed to grow to confluency in standard complete growth medium. Upon confluency, complete growth culture media was removed from the plates using an automated BioMek i5 liquid handler. Clarified conditioned media from transient HPT transfections in EXPI293F™, were transferred to Pompe patient-derived fibroblasts, and allowed to incubate for 24 hours at 37° C., 5% CO₂. Medium was removed from the cultures using an automated BioMek i5 liquid handler. The cells were briefly washed with 150 μL 1×DPBS/well, and DPBS was removed using an automated BioMek i5 liquid handler. Then, 200 μL standard complete growth culture medium was added to each well, and the plates were returned to the incubator for 72 hours. At the conclusion of incubation, standard complete growth media was removed using an automated BioMek i5 liquid handler. The cells were washed with 150 μL 1×DPBS/well, and the DPBS removed using an automated BioMek i5 liquid handling. The cells were lysed via addition of 50 μL of McIlvaine buffer, pH 4.4, supplemented with 0.5% TRITON X-100^{T}M non-ionic surfactant (Sigma, Cat #93443) and agitation at room temperature for 30 minutes. Activity was assessed by addition of 50 μL of 1.5 mM 4-MU-GLU in McIlvaine buffer, pH 4.4. The plates were sealed, incubated at 37° C. for 360 minutes with agitation at 400 rpm, prior to quenching with 100 μL of 0.5M sodium carbonate, pH 10.5. Hydrolysis was analyzed using an EnVision microplate reader (Perkin Elmer) monitoring fluorescence (Ex. 355 nm, Em. 460 nm). Cellular uptake FIOPC was calculated by dividing normalized GAA variant intracellular activity by the activity of the reference polypeptide with the indicated SEQ ID NO.

### Example 3

### GAA Variants of SEQ ID NO: 11

[0286] In this Example, experiments for evolution and screening of GAA variants derived from SEQ ID NO: 11 for improved GAA activity after a series of challenges are described. Libraries of variant genes GAA encoded based on SEQ ID NO: 11 were constructed, plated, grown, and screened for GAA 4-MU-GLU activity (“Unchallenged Activity FOPC”), as well as after plasma challenge (“Plasma Stability and Activity FOPC”), as described in Example 2. Variants were also tested for 4-MU-GLU activity after lysis of treatments of Pompe fibroblasts with conditioned media (“Lysate Activity from Treatment of Pompe Fibroblast FIOPC”), as described in Example 2. The results of these assays are presented in Table 3-1.

TABLE 3-1
Activity of GAA Variants Under Various Conditions Relative to SEQ ID NO: 12¹

| | | | | | Lysate |
|---|---|---|---|---|---|
| | | | | | Activity from |
| | Amino Acid | Amino Acid | | Plasma | Treatment |
| SEQ ID | Differences | Differences | Unchallenged | Stability | of Pompe |
| NO: | (Relative to | Relative to | Activity | and Activity | Fibroblast |
| (nt/aa) | SEQ ID NO: 2) | SEQ ID NO: 12 | FIOPC | FIOPC | FIOPC |
| 13/14 | L24W/L28S/L29T/P39Q/Q50V/ | L305V | + | + | + |
| | A62L/P78E/D87E/S135Q/T150S/ | | | | |
| | T266N/R267K/L305V/A437G/T486E/ | | | | |
| | E522V/L569T/L670T/T692G/ | | | | |
| | A711H/L736M/A750P/A812E/ | | | | |
| | Q830K/G842S/L871E/R883H/ | | | | |
| | Q894G/V913R/S932A | | | | |
| 15/16 | L24W/L28S/L29T/P39Q/Q50V/ | Q135P | | + | |
| | A62L/P78E/D87E/S135P/T150S/ | | | | |
| | T266N/R267K/A437G/T486E/E522V/ | | | | |
| | L569T/L670T/T692G/A711H/ | | | | |
| | L736M/A750P/A812E/Q830K/ | | | | |
| | G842S/L871E/R883H/Q894G/V913R/ | | | | |
| | S932A | | | | |
| 17/18 | L24W/L28S/L29T/P39Q/Q50V/ | E486Q | + | + | + |
| | A62L/P78E/D87E/S135Q/T150S/ | | | | |
| | T266N/R267K/A437G/T486Q/E522V/ | | | | |
| | L569T/L670T/T692G/A711H/ | | | | |
| | L736M/A750P/A812E/Q830K/ | | | | |
| | G842S/L871E/R883H/Q894G/V913R/ | | | | |
| | S932A | | | | |
| 19/20 | L24W/L28S/L29T/P39Q/Q50V/ | S842E | + | | |
| | A62L/P78E/D87E/S135Q/T150S/ | | | | |
| | T266N/R267K/A437G/T486E/E522V/ | | | | |
| | L569T/L670T/T692G/A711H/ | | | | |
| | L736M/A750P/A812E/Q830K/ | | | | |
| | G842E/L871E/R883H/Q894G/V913R/ | | | | |
| | S932A | | | | |
| 21/22 | L24W/L28S/L29T/P39Q/Q50V/ | E78G | + | + | + |
| | A62L/P78G/D87E/S135Q/T150S/ | | | | |
| | T266N/R267K/A437G/T486E/ | | | | |
| | E522V/L569T/L670T/T692G/ | | | | |
| | A711H/L736M/A750P/A812E/Q830K/ | | | | |
| | G842S/L871E/R883H/Q894G/ | | | | |
| | V913R/S932A | | | | |
| 23/24 | L24W/L28S/L29T/P39Q/Q50V/ | G894S | + | + | |
| | A62L/P78E/D87E/S135Q/T150S/ | | | | |
| | T266N/R267K/A437G/T486E/E522V/ | | | | |
| | L569T/L670T/T692G/A711H/ | | | | |
| | L736M/A750P/A812E/Q830K/ | | | | |
| | G842S/L871E/R883H/Q894S/ | | | | |
| | V913R/S932A | | | | |
| 25/26 | L24W/L28S/L29A/P39Q/Q50V/ | T29A | + | + | |
| | A62L/P78E/D87E/S135Q/T150S/ | | | | |
| | T266N/R267K/A437G/T486E/ | | | | |
| | E522V/L569T/L670T/T692G/A711H/ | | | | |
| | L736M/A750P/A812E/Q830K/ | | | | |
| | G842S/L871E/R883H/Q894G/ | | | | |
| | V913R/S932A | | | | |
| 27/28 | L24W/L28S/L29T/P39Q/Q50V/ | S842G | + | | |
| | A62L/P78E/D87E/S135Q/T150S/ | | | | |
| | T266N/R267K/A437G/T486E/E522V/ | | | | |
| | L569T/L670T/T692G/A711H/ | | | | |
| | L736M/A750P/A812E/Q830K/ | | | | |
| | L871E/R883H/Q894G/V913R/S932A | | | | |
| 29/30 | L24W/L28S/L29T/P39Q/Q50V/ | L62S | | + | |
| | A62S/P78E/D87E/S135Q/T150S/ | | | | |
| | T266N/R267K/A437G/T486E/E522V/ | | | | |
| | L569T/L670T/T692G/A711H/ | | | | |
| | L736M/A750P/A812E/Q830K/ | | | | |
| | G842S/L871E/R883H/Q894G/V913R/ | | | | |
| | S932A | | | | |
| 31/32 | L24W/L28S/L29T/P39Q/Q50V/ | A932R | + | + | ++ |
| | A62L/P78E/D87E/S135Q/T150S/ | | | | |
| | T266N/R267K/A437G/T486E/E522V/ | | | | |
| | L569T/L670T/T692G/A711H/ | | | | |
| | L736M/A750P/A812E/Q830K/ | | | | |
| | G842S/L871E/R883H/Q894G/V913R/ | | | | |
| | S932R | | | | |
| 33/34 | L24W/L28A/L29T/P39Q/Q50V/ | S28A | + | + | |
| | A62L/P78E/D87E/S135Q/T150S/ | | | | |
| | T266N/R267K/A437G/T486E/E522V/ | | | | |
| | L569T/L670T/T692G/A711H/ | | | | |
| | L736M/A750P/A812E/Q830K/ | | | | |
| | G842S/L871E/R883H/Q894G/V913R/ | | | | |
| | S932A | | | | |
| 35/36 | L24W/L28S/L29T/P39Q/Q50V/ | T569A | + | + | + |
| | A62L/P78E/D87E/S135Q/T150S/ | | | | |
| | T266N/R267K/A437G/T486E/E522V/ | | | | |
| | L569A/L670T/T692G/A711H/ | | | | |
| | L736M/A750P/A812E/Q830K/ | | | | |
| | G842S/L871E/R883H/Q894G/V913R/ | | | | |
| | S932A | | | | |
| 37/38 | L24W/L28S/L29T/P39Q/Q50V/ | T569R | + | | |
| | A62L/P78E/D87E/S135Q/T150S/ | | | | |
| | T266N/R267K/A437G/T486E/E522V/ | | | | |
| | L569R/L670T/T692G/A711H/ | | | | |
| | L736M/A750P/A812E/Q830K/ | | | | |
| | G842S/L871E/R883H/Q894G/V913R/ | | | | |
| | S932A | | | | |
| 39/40 | L24W/L28S/L29T/P39Q/Q50V/ | S842W | + | | |
| | A62L/P78E/D87E/S135Q/T150S/ | | | | |
| | T266N/R267K/A437G/T486E/E522V/ | | | | |
| | L569T/L670T/T692G/A711H/ | | | | |
| | L736M/A750P/A812E/Q830K/ | | | | |
| | G842W/L871E/R883H/Q894G/V913R/ | | | | |
| | S932A | | | | |
| 41/42 | L24W/L28S/L29C/P39Q/Q50V/ | T29C | | + | |
| | A62L/P78E/D87E/S135Q/T150S/ | | | | |
| | T266N/R267K/A437G/T486E/E522V/ | | | | |
| | L569T/L670T/T692G/A711H/ | | | | |
| | L736M/A750P/A812E/Q830K/ | | | | |
| | G842S/L871E/R883H/Q894G/V913R/ | | | | |
| | S932A | | | | |
| 43/44 | L24W/L28S/L29T/P39Q/Q50V/ | K267L | | | + |
| | A62L/P78E/D87E/S135Q/T150S/ | | | | |
| | T266N/R267L/A437G/T486E/E522V/ | | | | |
| | L569T/L670T/T692G/A711H/ | | | | |
| | L736M/A750P/A812E/Q830K/ | | | | |
| | G842S/L871E/R883H/Q894G/V913R/ | | | | |
| | S932A | | | | |
| 45/46 | L24W/L28S/L29T/P39Q/Q50V/ | E87Q | | + | ++ |
| | A62L/P78E/D87Q/S135Q/T150S/ | | | | |
| | T266N/R267K/A437G/T486E/ | | | | |
| | E522V/L569T/L670T/T692G/A711H/ | | | | |
| | L736M/A750P/A812E/Q830K/ | | | | |
| | G842S/L871E/R883H/Q894G/ | | | | |
| | V913R/S932A | | | | |
| 47/48 | L24W/L28S/L29T/P39Q/Q50V/ | L62D | + | + | |
| | A62D/P78E/D87E/S135Q/T150S/ | | | | |
| | T266N/R267K/A437G/T486E/E522V/ | | | | |
| | L569T/L670T/T692G/A711H/ | | | | |
| | L736M/A750P/A812E/Q830K/ | | | | |
| | G842S/L871E/R883H/Q894G/ | | | | |
| | V913R/S932A | | | | |
| 49/50 | L24W/L28S/L29T/P39Q/Q50V/ | L62H | + | ++ | |
| | A62H/P78E/D87E/S135Q/T150S/ | | | | |
| | T266N/R267K/A437G/T486E/E522V/ | | | | |
| | L569T/L670T/T692G/A711H/ | | | | |
| | L736M/A750P/A812E/Q830K/ | | | | |
| | G842S/L871E/R883H/Q894G/ | | | | |
| | V913R/S932A | | | | |
| 51/52 | L24W/L28S/L29T/P39Q/Q50V/ | Q135R | + | + | ++ |
| | A62L/P78E/D87E/S135R/T150S/ | | | | |
| | T266N/R267K/A437G/T486E/E522V/ | | | | |
| | L569T/L670T/T692G/A711H/ | | | | |
| | L736M/A750P/A812E/Q830K/ | | | | |
| | G842S/L871E/R883H/Q894G/V913R/ | | | | |
| | S932A | | | | |
| 53/54 | L28S/L29T/P39Q/Q50V/A62L/P78E/ | W24L | ++ | + | + |
| | D87E/S135Q/T150S/T266N/ | | | | |
| | R267K/A437G/T486E/E522V/L569T/ | | | | |
| | L670T/T692G/A711H/L736M/ | | | | |
| | A750P/A812E/Q830K/G842S/ | | | | |
| | L871E/R883H/Q894G/V913R/S932A | | | | |
| 55/56 | L24W/L28S/L29T/P39Q/Q50V/ | E871A | + | + | ++ |
| | A62L/P78E/D87E/S135Q/T150S/ | | | | |
| | T266N/R267K/A437G/T486E/E522V/ | | | | |
| | L569T/L670T/T692G/A711H/ | | | | |
| | L736M/A750P/A812E/Q830K/ | | | | |
| | G842S/L871A/R883H/Q894G/ | | | | |
| | V913R/S932A | | | | |
| 57/58 | L24W/L28S/L29T/P39Q/Q50S/A62L/ | V50S | + | + | |
| | P78E/D87E/S135Q/T150S/T266N/ | | | | |
| | R267K/A437G/T486E/E522V/ | | | | |
| | L569T/L670T/T692G/A711H/ | | | | |
| | L736M/A750P/A812E/Q830K/ | | | | |
| | G842S/L871E/R883H/Q894G/V913R/ | | | | |
| | S932A | | | | |
| 59/60 | L24W/L28S/L29T/P39Q/Q50V/P78E/ | L62A | + | + | |
| | D87E/S135Q/T150S/T266N/ | | | | |
| | R267K/A437G/T486E/E522V/L569T/ | | | | |
| | L670T/T692G/A711H/L736M/ | | | | |
| | A750P/A812E/Q830K/G842S/ | | | | |
| | L871E/R883H/Q894G/V913R/S932A | | | | |
| 61/62 | L24W/L28S/L29T/P39Q/Q50V/ | T569G | | + | |
| | A62L/P78E/D87E/S135Q/T150S/ | | | | |
| | T266N/R267K/A437G/T486E/E522V/ | | | | |
| | L569G/L670T/T692G/A711H/ | | | | |
| | L736M/A750P/A812E/Q830K/ | | | | |
| | G842S/L871E/R883H/Q894G/V913R/ | | | | |
| | S932A | | | | |
| 63/64 | L24W/L28S/L29T/P39Q/Q50V/ | G692R | + | + | + |
| | A62L/P78E/D87E/S135Q/T150S/ | | | | |
| | T266N/R267K/A437G/T486E/E522V/ | | | | |
| | L569T/L670T/T692R/A711H/ | | | | |
| | L736M/A750P/A812E/Q830K/ | | | | |
| | G842S/L871E/R883H/Q894G/V913R/ | | | | |
| | S932A | | | | |
| 65/66 | L24W/L28S/L29T/P39Q/Q50V/ | K830N | + | + | |
| | A62L/P78E/D87E/S135Q/T150S/ | | | | |
| | T266N/R267K/A437G/T486E/E522V/ | | | | |
| | L569T/L670T/T692G/A711H/ | | | | |
| | L736M/A750P/A812E/Q830N/ | | | | |
| | G842S/L871E/R883H/Q894G/V913R/ | | | | |
| | S932A | | | | |
| 67/68 | L24W/L28S/L29T/P39Q/Q50V/ | G894R | + | + | + |
| | A62L/P78E/D87E/S135Q/T150S/ | | | | |
| | T266N/R267K/A437G/T486E/E522V/ | | | | |
| | L569T/L670T/T692G/A711H/ | | | | |
| | L736M/A750P/A812E/Q830K/ | | | | |
| | G842S/L871E/R883H/Q894R/V913R/ | | | | |
| | S932A | | | | |
| 69/70 | L24W/L28S/L29T/P39Q/Q50V/ | K267T | | | ++ |
| | A62L/P78E/D87E/S135Q/T150S/ | | | | |
| | T266N/R267T/A437G/T486E/E522V/ | | | | |
| | L569T/L670T/T692G/A711H/ | | | | |
| | L736M/A750P/A812E/Q830K/ | | | | |
| | G842S/L871E/R883H/Q894G/V913R/ | | | | |
| | S932A | | | | |
| 71/72 | L24E/L28S/L29T/P39Q/Q50V/A62L/ | W24E | +++ | +++ | ++ |
| | P78E/D87E/S135Q/T150S/T266N/ | | | | |
| | R267K/A437G/T486E/E522V/ | | | | |
| | L569T/L670T/T692G/A711H/ | | | | |
| | L736M/A750P/A812E/Q830K/G842S/ | | | | |
| | L871E/R883H/Q894G/V913R/ | | | | |
| | S932A | | | | |
| 73/74 | L24W/L28S/L29T/P39Q/Q50V/ | Q135G | | + | |
| | A62L/P78E/D87E/S135G/T150S/ | | | | |
| | T266N/R267K/A437G/T486E/E522V/ | | | | |
| | L569T/L670T/T692G/A711H/ | | | | |
| | L736M/A750P/A812E/Q830K/ | | | | |
| | G842S/L871E/R883H/Q894G/V913R/ | | | | |
| | S932A | | | | |
| 75/76 | L24W/L28S/L29T/P39Q/Q50V/ | G692V | + | + | |
| | A62L/P78E/D87E/S135Q/T150S/ | | | | |
| | T266N/R267K/A437G/T486E/E522V/ | | | | |
| | L569T/L670T/T692V/A711H/ | | | | |
| | L736M/A750P/A812E/Q830K/ | | | | |
| | G842S/L871E/R883H/Q894G/V913R/ | | | | |
| | S932A | | | | |
| 77/78 | L24W/L28S/L29T/P39Q/Q50V/ | E87R | | | + |
| | A62L/P78E/D87R/S135Q/T150S/ | | | | |
| | T266N/R267K/A437G/T486E/E522V/ | | | | |
| | L569T/L670T/T692G/A711H/ | | | | |
| | L736M/A750P/A812E/Q830K/ | | | | |
| | G842S/L871E/R883H/Q894G/ | | | | |
| | V913R/S932A | | | | |
| 79/80 | L24W/L28S/L29T/P39Q/Q50V/ | R913Q | + | + | |
| | A62L/P78E/D87E/S135Q/T150S/ | | | | |
| | T266N/R267K/A437G/T486E/E522V/ | | | | |
| | L569T/L670T/T692G/A711H/ | | | | |
| | L736M/A750P/A812E/Q830K/ | | | | |
| | G842S/L871E/R883H/Q894G/V913Q/ | | | | |
| | S932A | | | | |
| 81/82 | L24W/L28S/L29T/P39Q/Q50V/ | H711L | + | ++ | + |
| | A62L/P78E/D87E/S135Q/T150S/ | | | | |
| | T266N/R267K/A437G/T486E/E522V/ | | | | |
| | L569T/L670T/T692G/A711L/ | | | | |
| | L736M/A750P/A812E/Q830K/ | | | | |
| | G842S/L871E/R883H/Q894G/V913R/ | | | | |
| | S932A | | | | |
| 83/84 | L24W/L28S/L29T/P39Q/Q50V/ | E87L | | | + |
| | A62L/P78E/D87L/S135Q/T150S/ | | | | |
| | T266N/R267K/A437G/T486E/E522V/ | | | | |
| | L569T/L670T/T692G/A711H/ | | | | |
| | L736M/A750P/A812E/Q830K/ | | | | |
| | G842S/L871E/R883H/Q894G/V913R/ | | | | |
| | S932A | | | | |
| 85/86 | L24W/L28S/L29T/P39Q/Q50V/ | E87V | | + | + |
| | A62L/P78E/D87V/S135Q/T150S/ | | | | |
| | T266N/R267K/A437G/T486E/E522V/ | | | | |
| | L569T/L670T/T692G/A711H/ | | | | |
| | L736M/A750P/A812E/Q830K/ | | | | |
| | G842S/L871E/R883H/Q894G/ | | | | |
| | V913R/S932A | | | | |
| 87/88 | L24W/L28S/L29T/P39Q/Q50V/ | E78Y | | + | +++ |
| | A62L/P78Y/D87E/S135Q/T150S/ | | | | |
| | T266N/R267K/A437G/T486E/E522V/ | | | | |
| | L569T/L670T/T692G/A711H/ | | | | |
| | L736M/A750P/A812E/Q830K/ | | | | |
| | G842S/L871E/R883H/Q894G/ | | | | |
| | V913R/S932A | | | | |
| 89/90 | L24W/L28S/L29T/P39Q/Q50V/ | T569C | + | + | |
| | A62L/P78E/D87E/S135Q/T150S/ | | | | |
| | T266N/R267K/A437G/T486E/E522V/ | | | | |
| | L569C/L670T/T692G/A711H/ | | | | |
| | L736M/A750P/A812E/Q830K/ | | | | |
| | G842S/L871E/R883H/Q894G/V913R/ | | | | |
| | S932A | | | | |
| 91/92 | L24W/L28S/L29T/P39Q/Q50V/ | E87W | | | + |
| | A62L/P78E/D87W/S135Q/T150S/ | | | | |
| | T266N/R267K/A437G/T486E/E522V/ | | | | |
| | L569T/L670T/T692G/A711H/ | | | | |
| | L736M/A750P/A812E/Q830K/ | | | | |
| | G842S/L871E/R883H/Q894G/ | | | | |
| | V913R/S932A | | | | |
| 93/94 | L24W/L28S/L29T/P39Q/Q50V/ | T670A | ++ | + | + |
| | A62L/P78E/D87E/S135Q/T150S/ | | | | |
| | T266N/R267K/A437G/T486E/E522V/ | | | | |
| | L569T/L670A/T692G/A711H/ | | | | |
| | L736M/A750P/A812E/Q830K/ | | | | |
| | G842S/L871E/R883H/Q894G/ | | | | |
| | V913R/S932A | | | | |
| 95/96 | L24W/L28S/L29T/P39Q/Q50V/ | T569Q | ++ | + | |
| | A62L/P78E/D87E/S135Q/T150S/ | | | | |
| | T266N/R267K/A437G/T486E/E522V/ | | | | |
| | L569Q/L670T/T692G/A711H/ | | | | |
| | L736M/A750P/A812E/Q830K/ | | | | |
| | G842S/L871E/R883H/Q894G/ | | | | |
| | V913R/S932A | | | | |
| 97/98 | L24W/L28S/L29T/P39Q/Q50V/ | L62K | + | + | + |
| | A62K/P78E/D87E/S135Q/T150S/ | | | | |
| | T266N/R267K/A437G/T486E/E522V/ | | | | |
| | L569T/L670T/T692G/A711H/ | | | | |
| | L736M/A750P/A812E/Q830K/ | | | | |
| | G842S/L871E/R883H/Q894G/ | | | | |
| | V913R/S932A | | | | |
| 99/100 | L24W/L28S/L29T/P39Q/Q50V/ | G894C | + | + | |
| | A62L/P78E/D87E/S135Q/T150S/ | | | | |
| | T266N/R267K/A437G/T486E/E522V/ | | | | |
| | L569T/L670T/T692G/A711H/ | | | | |
| | L736M/A750P/A812E/Q830K/ | | | | |
| | G842S/L871E/R883H/Q894C/ | | | | |
| | V913R/S932A | | | | |
| 101/102 | L24W/L28S/L29T/P39Q/Q50V/ | T569H | + | + | |
| | A62L/P78E/D87E/S135Q/T150S/ | | | | |
| | T266N/R267K/A437G/T486E/E522V/ | | | | |
| | L569H/L670T/T692G/A711H/ | | | | |
| | L736M/A750P/A812E/Q830K/ | | | | |
| | G842S/L871E/R883H/Q894G/ | | | | |
| | V913R/S932A | | | | |
| 103/104 | L24W/L28S/L29T/P39Q/Q50V/ | H711V | + | + | |
| | A62L/P78E/D87E/S135Q/T150S/ | | | | |
| | T266N/R267K/A437G/T486E/E522V/ | | | | |
| | L569T/L670T/T692G/A711V/ | | | | |
| | L736M/A750P/A812E/Q830K/ | | | | |
| | G842S/L871E/R883H/Q894G/ | | | | |
| | V913R/S932A | | | | |
| 105/106 | L24W/L28S/L29T/P39Q/Q50V/ | V522S | + | | |
| | A62L/P78E/D87E/S135Q/T150S/ | | | | |
| | T266N/R267K/A437G/T486E/E522S/ | | | | |
| | L569T/L670T/T692G/A711H/ | | | | |
| | L736M/A750P/A812E/Q830K/ | | | | |
| | G842S/L871E/R883H/Q894G/ | | | | |
| | V913R/S932A | | | | |
| 107/108 | L24F/L28S/L29T/P39Q/Q50V/ | W24F | ++ | ++ | ++ |
| | A62L/P78E/D87E/S135Q/T150S/ | | | | |
| | T266N/R267K/A437G/T486E/E522V/ | | | | |
| | L569T/L670T/T692G/A711H/ | | | | |
| | L736M/A750P/A812E/Q830K/ | | | | |
| | G842S/L871E/R883H/Q894G/ | | | | |
| | V913R/S932A | | | | |
| 109/110 | L24W/L28S/L29T/P39Q/Q50V/ | T569M | ++ | + | ++ |
| | A62L/P78E/D87E/S135Q/T150S/ | | | | |
| | T266N/R267K/A437G/T486E/E522V/ | | | | |
| | L569M/L670T/T692G/A711H/ | | | | |
| | L736M/A750P/A812E/Q830K/ | | | | |
| | G842S/L871E/R883H/Q894G/ | | | | |
| | V913R/S932A | | | | |
| 111/112 | L24W/L28S/L29T/P39Q/Q50V/ | H711S | ++ | ++ | + |
| | A62L/P78E/D87E/S135Q/T150S/ | | | | |
| | T266N/R267K/A437G/T486E/ | | | | |
| | E522V/L569T/L670T/T692G/A711S/ | | | | |
| | L736M/A750P/A812E/Q830K/ | | | | |
| | G842S/L871E/R883H/Q894G/ | | | | |
| | V913R/S932A | | | | |
| 113/114 | L24Y/L28S/L29T/P39Q/Q50V/ | W24Y | +++ | +++ | +++ |
| | A62L/P78E/D87E/S135Q/T150S/ | | | | |
| | T266N/R267K/A437G/T486E/E522V/ | | | | |
| | L569T/L670T/T692G/A711H/ | | | | |
| | L736M/A750P/A812E/Q830K/ | | | | |
| | G842S/L871E/R883H/Q894G/ | | | | |
| | V913R/S932A | | | | |
| 115/116 | L24W/L28S/L29T/P39Q/Q50V/ | E87G | + | + | ++ |
| | A62L/P78E/D87G/S135Q/T150S/ | | | | |
| | T266N/R267K/A437G/T486E/ | | | | |
| | E522V/L569T/L670T/T692G/ | | | | |
| | A711H/L736M/A750P/A812E/Q830K/ | | | | |
| | G842S/L871E/R883H/Q894G/ | | | | |
| | V913R/S932A | | | | |
| 117/118 | L24W/L28S/L29T/P39Q/Q50V/ | E78I | + | + | + |
| | A62L/P78I/D87E/S135Q/T150S/ | | | | |
| | T266N/R267K/A437G/T486E/E522V/ | | | | |
| | L569T/L670T/T692G/A711H/ | | | | |
| | L736M/A750P/A812E/Q830K/ | | | | |
| | G842S/L871E/R883H/Q894G/ | | | | |
| | V913R/S932A | | | | |
| 119/120 | L24W/L28S/L29T/P39Q/Q50V/ | E871L | + | + | ++ |
| | A62L/P78E/D87E/S135Q/T150S/ | | | | |
| | T266N/R267K/A437G/T486E/E522V/ | | | | |
| | L569T/L670T/T692G/A711H/ | | | | |
| | L736M/A750P/A812E/Q830K/ | | | | |
| | G842S/R883H/Q894G/V913R/S932A | | | | |
| 121/122 | L24W/L28S/L29T/P39Q/Q50V/ | E78R | + | + | ++ |
| | A62L/P78R/D87E/S135Q/T150S/ | | | | |
| | T266N/R267K/A437G/T486E/E522V/ | | | | |
| | L569T/L670T/T692G/A711H/ | | | | |
| | L736M/A750P/A812E/Q830K/ | | | | |
| | G842S/L871E/R883H/Q894G/ | | | | |
| | V913R/S932A | | | | |
| 123/124 | L24W/L28S/L29T/P39Q/Q50V/ | T569L | + | + | |
| | A62L/P78E/D87E/S135Q/T150S/ | | | | |
| | T266N/R267K/A437G/T486E/E522V/ | | | | |
| | L670T/T692G/A711H/L736M/ | | | | |
| | A750P/A812E/Q830K/G842S/ | | | | |
| | L871E/R883H/Q894G/V913R/S932A | | | | |
| 125/126 | L24C/L28S/L29T/P39Q/Q50V/A62L/ | W24C | +++ | +++ | +++ |
| | P78E/D87E/S135Q/T150S/T266N/ | | | | |
| | R267K/A437G/T486E/E522V/ | | | | |
| | L569T/L670T/T692G/A711H/ | | | | |
| | L736M/A750P/A812E/Q830K/ | | | | |
| | G842S/L871E/R883H/Q894G/ | | | | |
| | V913R/S932A | | | | |
| 127/128 | L24W/L28S/L29T/P39Q/Q50V/ | T670L | + | + | + |
| | A62L/P78E/D87E/S135Q/T150S/ | | | | |
| | T266N/R267K/A437G/T486E/E522V/ | | | | |
| | L569T/T692G/A711H/L736M/ | | | | |
| | A750P/A812E/Q830K/G842S/ | | | | |
| | L871E/R883H/Q894G/V913R/S932A | | | | |
| 129/130 | L24W/L28S/L29T/P39Q/Q50V/ | E78W | + | + | +++ |
| | A62L/P78W/D87E/S135Q/T150S/ | | | | |
| | T266N/R267K/A437G/T486E/E522V/ | | | | |
| | L569T/L670T/T692G/A711H/ | | | | |
| | L736M/A750P/A812E/Q830K/ | | | | |
| | G842S/L871E/R883H/Q894G/ | | | | |
| | V913R/S932A | | | | |
| 131/132 | L24W/L28S/L29T/P39Q/Q50V/ | V522F | + | | |
| | A62L/P78E/D87E/S135Q/T150S/ | | | | |
| | T266N/R267K/A437G/T486E/E522F/ | | | | |
| | L569T/L670T/T692G/A711H/ | | | | |
| | L736M/A750P/A812E/Q830K/ | | | | |
| | G842S/L871E/R883H/Q894G/ | | | | |
| | V913R/S932A | | | | |
| 133/134 | L24W/L28S/L29T/P39Q/Q50V/ | V522P | + | | |
| | A62L/P78E/D87E/S135Q/T150S/ | | | | |
| | T266N/R267K/A437G/T486E/E522P/ | | | | |
| | L569T/L670T/T692G/A711H/ | | | | |
| | L736M/A750P/A812E/Q830K/ | | | | |
| | G842S/L871E/R883H/Q894G/ | | | | |
| | V913R/S932A | | | | |
| 135/136 | L24W/L28S/L29T/P39Q/Q50V/ | K830V | + | + | |
| | A62L/P78E/D87E/S135Q/T150S/ | | | | |
| | T266N/R267K/A437G/T486E/E522V/ | | | | |
| | L569T/L670T/T692G/A711H/ | | | | |
| | L736M/A750P/A812E/Q830V/ | | | | |
| | G842S/L871E/R883H/Q894G/ | | | | |
| | V913R/S932A | | | | |
| 137/138 | L24W/L28S/L29T/P39Q/Q50V/ | H711M | + | + | + |
| | A62L/P78E/D87E/S135Q/T150S/ | | | | |
| | T266N/R267K/A437G/T486E/E522V/ | | | | |
| | L569T/L670T/T692G/A711M/ | | | | |
| | L736M/A750P/A812E/Q830K/ | | | | |
| | G842S/L871E/R883H/Q894G/ | | | | |
| | V913R/S932A | | | | |
| 139/140 | L24W/L28T/L29T/P39Q/Q50V/ | S28T | + | + | |
| | A62L/P78E/D87E/S135Q/T150S/ | | | | |
| | T266N/R267K/A437G/T486E/E522V/ | | | | |
| | L569T/L670T/T692G/A711H/ | | | | |
| | L736M/A750P/A812E/Q830K/ | | | | |
| | G842S/L871E/R883H/Q894G/ | | | | |
| | V913R/S932A | | | | |
| 141/142 | L24W/L28S/L29T/P39Q/Q50V/ | T569K | ++ | + | + |
| | A62L/P78E/D87E/S135Q/T150S/ | | | | |
| | T266N/R267K/A437G/T486E/E522V/ | | | | |
| | L569K/L670T/T692G/A711H/ | | | | |
| | L736M/A750P/A812E/Q830K/ | | | | |
| | G842S/L871E/R883H/Q894G/ | | | | |
| | V913R/S932A | | | | |
| 143/144 | L24S/L28S/L29T/P39Q/Q50V/ | W24S | ++ | ++ | |
| | A62L/P78E/D87E/S135Q/T150S/ | | | | |
| | T266N/R267K/A437G/T486E/E522V/ | | | | |
| | L569T/L670T/T692G/A711H/ | | | | |
| | L736M/A750P/A812E/Q830K/ | | | | |
| | G842S/L871E/R883H/Q894G/ | | | | |
| | V913R/S932A | | | | |
| 145/146 | L24W/L28S/L29T/P39Q/Q50V/ | Q135L | + | + | + |
| | A62L/P78E/D87E/S135L/T150S/ | | | | |
| | T266N/R267K/A437G/T486E/E522V/ | | | | |
| | L569T/L670T/T692G/A711H/ | | | | |
| | L736M/A750P/A812E/Q830K/ | | | | |
| | G842S/L871E/R883H/Q894G/ | | | | |
| | V913R/S932A | | | | |
| 147/148 | L24W/L28S/L29T/P39Q/Q50V/ | S842R | | + | |
| | A62L/P78E/D87E/S135Q/T150S/ | | | | |
| | T266N/R267K/A437G/T486E/E522V/ | | | | |
| | L569T/L670T/T692G/A711H/ | | | | |
| | L736M/A750P/A812E/Q830K/ | | | | |
| | G842R/L871E/R883H/Q894G/ | | | | |
| | V913R/S932A | | | | |
| 149/150 | L24W/L28S/L29T/P39Q/Q50V/ | G894Y | + | ++ | + |
| | A62L/P78E/D87E/S135Q/T150S/ | | | | |
| | T266N/R267K/A437G/T486E/E522V/ | | | | |
| | L569T/L670T/T692G/A711H/ | | | | |
| | L736M/A750P/A812E/Q830K/ | | | | |
| | G842S/L871E/R883H/Q894Y/ | | | | |
| | V913R/S932A | | | | |
| 151/152 | L24W/L28S/L29T/P39Q/Q50V/ | S842T | + | + | |
| | A62L/P78E/D87E/S135Q/T150S/ | | | | |
| | T266N/R267K/A437G/T486E/E522V/ | | | | |
| | L569T/L670T/T692G/A711H/ | | | | |
| | L736M/A750P/A812E/Q830K/ | | | | |
| | G842T/L871E/R883H/Q894G/ | | | | |
| | V913R/S932A | | | | |
| 153/154 | L24W/L28S/L29T/P39Q/Q50V/ | G894T | + | ++ | |
| | A62L/P78E/D87E/S135Q/T150S/ | | | | |
| | T266N/R267K/A437G/T486E/E522V/ | | | | |
| | L569T/L670T/T692G/A711H/ | | | | |
| | L736M/A750P/A812E/Q830K/ | | | | |
| | G842S/L871E/R883H/Q894T/ | | | | |
| | V913R/S932A | | | | |
| 155/156 | L24W/L28Q/L29T/P39Q/Q50V/ | S28Q | + | + | |
| | A62L/P78E/D87E/S135Q/T150S/ | | | | |
| | T266N/R267K/A437G/T486E/E522V/ | | | | |
| | L569T/L670T/T692G/A711H/ | | | | |
| | L736M/A750P/A812E/Q830K/ | | | | |
| | G842S/L871E/R883H/Q894G/ | | | | |
| | V913R/S932A | | | | |
| 157/158 | L24W/L28S/L29T/P39Q/Q50V/ | H711A | ++ | ++ | ++ |
| | A62L/P78E/D87E/S135Q/T150S/ | | | | |
| | T266N/R267K/A437G/T486E/E522V/ | | | | |
| | L569T/L670T/T692G/L736M/ | | | | |
| | A750P/A812E/Q830K/G842S/ | | | | |
| | L871E/R883H/Q894G/V913R/S932A | | | | |
| 159/160 | L24W/L28S/L29T/P39Q/Q50V/ | N266H | + | | + |
| | A62L/P78E/D87E/S135Q/T150S/ | | | | |
| | T266H/R267K/A437G/T486E/E522V/ | | | | |
| | L569T/L670T/T692G/A711H/ | | | | |
| | L736M/A750P/A812E/Q830K/ | | | | |
| | G842S/L871E/R883H/Q894G/ | | | | |
| | V913R/S932A | | | | |
| 161/162 | L24W/L28S/L29T/P39Q/Q50V/ | L62P | + | + | |
| | A62P/P78E/D87E/S135Q/T150S/ | | | | |
| | T266N/R267K/A437G/T486E/E522V/ | | | | |
| | L569T/L670T/T692G/A711H/ | | | | |
| | L736M/A750P/A812E/Q830K/ | | | | |
| | G842S/L871E/R883H/Q894G/ | | | | |
| | V913R/S932A | | | | |
| 163/164 | L24W/L28S/L29T/P39L/Q50V/ | Q39L | + | + | +++ |
| | A62L/P78E/D87E/S135Q/T150S/ | | | | |
| | T266N/R267K/A437G/T486E/E522V/ | | | | |
| | L569T/L670T/T692G/A711H/ | | | | |
| | L736M/A750P/A812E/Q830K/ | | | | |
| | G842S/L871E/R883H/Q894G/ | | | | |
| | V913R/S932A | | | | |
| 165/166 | L24W/L28S/L29T/P39Q/Q50V/ | E486D | + | + | ++ |
| | A62L/P78E/D87E/S135Q/T150S/ | | | | |
| | T266N/R267K/A437G/T486D/E522V/ | | | | |
| | L569T/L670T/T692G/A711H/ | | | | |
| | L736M/A750P/A812E/Q830K/ | | | | |
| | G842S/L871E/R883H/Q894G/ | | | | |
| | V913R/S932A | | | | |
| 167/168 | L24W/L28S/L29T/P39Q/Q50V/ | H711G | + | + | + |
| | A62L/P78E/D87E/S135Q/T150S/ | | | | |
| | T266N/R267K/A437G/T486E/E522V/ | | | | |
| | L569T/L670T/T692G/A711G/ | | | | |
| | L736M/A750P/A812E/Q830K/ | | | | |
| | G842S/L871E/R883H/Q894G/ | | | | |
| | V913R/S932A | | | | |
| 169/170 | L24N/L28S/L29T/P39Q/Q50V/ | W24N | +++ | +++ | ++ |
| | A62L/P78E/D87E/S135Q/T150S/ | | | | |
| | T266N/R267K/A437G/T486E/E522V/ | | | | |
| | L569T/L670T/T692G/A711H/ | | | | |
| | L736M/A750P/A812E/Q830K/ | | | | |
| | G842S/L871E/R883H/Q894G/ | | | | |
| | V913R/S932A | | | | |
| 171/172 | L24W/L28S/L29T/P39Q/Q50V/ | H711W | + | + | |
| | A62L/P78E/D87E/S135Q/T150S/ | | | | |
| | T266N/R267K/A437G/T486E/E522V/ | | | | |
| | L569T/L670T/T692G/A711W/ | | | | |
| | L736M/A750P/A812E/Q830K/ | | | | |
| | G842S/L871E/R883H/Q894G/ | | | | |
| | V913R/S932A | | | | |
| 173/174 | L24W/L28S/L29T/P39Q/Q50V/ | E871R | + | ++ | ++ |
| | A62L/P78E/D87E/S135Q/T150S/ | | | | |
| | T266N/R267K/A437G/T486E/E522V/ | | | | |
| | L569T/L670T/T692G/A711H/ | | | | |
| | L736M/A750P/A812E/Q830K/ | | | | |
| | G842S/L871R/R883H/Q894G/ | | | | |
| | V913R/S932A | | | | |
| 175/176 | L24W/L28S/L29T/P39Q/Q50V/ | M736L | + | + | |
| | A62L/P78E/D87E/S135Q/T150S/ | | | | |
| | T266N/R267K/A437G/T486E/E522V/ | | | | |
| | L569T/L670T/T692G/A711H/ | | | | |
| | A750P/A812E/Q830K/G842S/ | | | | |
| | L871E/R883H/Q894G/V913R/S932A | | | | |
| 177/178 | L24W/L28S/L29T/P39Q/Q50V/ | V522W | + | | + |
| | A62L/P78E/D87E/S135Q/T150S/ | | | | |
| | T266N/R267K/A437G/T486E/E522W/ | | | | |
| | L569T/L670T/T692G/A711H/ | | | | |
| | L736M/A750P/A812E/Q830K/ | | | | |
| | G842S/L871E/R883H/Q894G/ | | | | |
| | V913R/S932A | | | | |
| 179/180 | L24W/L28S/L29T/P39Q/Q50V/ | G894L | | + | |
| | A62L/P78E/D87E/S135Q/T150S/ | | | | |
| | T266N/R267K/A437G/T486E/E522V/ | | | | |
| | L569T/L670T/T692G/A711H/ | | | | |
| | L736M/A750P/A812E/Q830K/ | | | | |
| | G842S/L871E/R883H/Q894L/ | | | | |
| | V913R/S932A | | | | |
| 181/182 | L24W/L28S/L29T/P39Q/Q50V/ | H883A | + | + | |
| | A62L/P78E/D87E/S135Q/T150S/ | | | | |
| | T266N/R267K/A437G/T486E/E522V/ | | | | |
| | L569T/L670T/T692G/A711H/ | | | | |
| | L736M/A750P/A812E/Q830K/ | | | | |
| | G842S/L871E/R883A/Q894G/ | | | | |
| | V913R/S932A | | | | |
| 183/184 | L24W/L28S/L29T/P39Q/Q50V/ | V522G | + | | |
| | A62L/P78E/D87E/S135Q/T150S/ | | | | |
| | T266N/R267K/A437G/T486E/E522G/ | | | | |
| | L569T/L670T/T692G/A711H/ | | | | |
| | L736M/A750P/A812E/Q830K/ | | | | |
| | G842S/L871E/R883H/Q894G/ | | | | |
| | V913R/S932A | | | | |
| 185/186 | L24W/L28S/L29T/P39Q/Q50V/ | V522L | | + | |
| | A62L/P78E/D87E/S135Q/T150S/ | | | | |
| | T266N/R267K/A437G/T486E/E522L/ | | | | |
| | L569T/L670T/T692G/A711H/ | | | | |
| | L736M/A750P/A812E/Q830K/ | | | | |
| | G842S/L871E/R883H/Q894G/ | | | | |
| | V913R/S932A | | | | |
| 187/188 | L24W/L28S/L29T/P39Q/Q50V/ | T670V | ++ | ++ | + |
| | A62L/P78E/D87E/S135Q/T150S/ | | | | |
| | T266N/R267K/A437G/T486E/E522V/ | | | | |
| | L569T/L670V/T692G/A711H/ | | | | |
| | L736M/A750P/A812E/Q830K/ | | | | |
| | G842S/L871E/R883H/Q894G/ | | | | |
| | V913R/S932A | | | | |
| 189/190 | L24W/L28S/L29T/P39Q/Q50V/ | L62G | | + | |
| | A62G/P78E/D87E/S135Q/T150S/ | | | | |
| | T266N/R267K/A437G/T486E/ | | | | |
| | E522V/L569T/L670T/T692G/A711H/ | | | | |
| | L736M/A750P/A812E/Q830K/ | | | | |
| | G842S/L871E/R883H/Q894G/ | | | | |
| | V913R/S932A | | | | |
| 191/192 | L24W/L28S/L29T/P39Q/Q50V/ | G692N | + | + | |
| | A62L/P78E/D87E/S135Q/T150S/ | | | | |
| | T266N/R267K/A437G/T486E/E522V/ | | | | |
| | L569T/L670T/T692N/A711H/ | | | | |
| | L736M/A750P/A812E/Q830K/ | | | | |
| | G842S/L871E/R883H/Q894G/ | | | | |
| | V913R/S932A | | | | |
| 193/194 | L24W/L28S/L29T/P39Q/Q50V/ | T569V | ++ | + | ++ |
| | A62L/P78E/D87E/S135Q/T150S/ | | | | |
| | T266N/R267K/A437G/T486E/E522V/ | | | | |
| | L569V/L670T/T692G/A711H/ | | | | |
| | L736M/A750P/A812E/Q830K/ | | | | |
| | G842S/L871E/R883H/Q894G/ | | | | |
| | V913R/S932A | | | | |
| 195/196 | L24W/L28S/L29T/P39Q/Q50V/ | T670I | + | + | |
| | A62L/P78E/D87E/S135Q/T150S/ | | | | |
| | T266N/R267K/A437G/T486E/E522V/ | | | | |
| | L569T/L670I/T692G/A711H/ | | | | |
| | L736M/A750P/A812E/Q830K/ | | | | |
| | G842S/L871E/R883H/Q894G/ | | | | |
| | V913R/S932A | | | | |
| 197/198 | L24W/L28S/L29T/P39Q/Q50V/ | E87A | + | + | + |
| | A62L/P78E/D87A/S135Q/T150S/ | | | | |
| | T266N/R267K/A437G/T486E/ | | | | |
| | E522V/L569T/L670T/T692G/A711H/ | | | | |
| | L736M/A750P/A812E/Q830K/ | | | | |
| | G842S/L871E/R883H/Q894G/ | | | | |
| | V913R/S932A | | | | |
| 199/200 | L24W/L28S/L29T/P39Q/Q50V/ | G894A | + | + | |
| | A62L/P78E/D87E/S135Q/T150S/ | | | | |
| | T266N/R267K/A437G/T486E/E522V/ | | | | |
| | L569T/L670T/T692G/A711H/ | | | | |
| | L736M/A750P/A812E/Q830K/ | | | | |
| | G842S/L871E/R883H/Q894A/ | | | | |
| | V913R/S932A | | | | |
| 201/202 | L24W/L28S/L29T/P39Q/Q50V/ | N266A | + | | |
| | A62L/P78E/D87E/S135Q/T150S/ | | | | |
| | T266A/R267K/A437G/T486E/E522V/ | | | | |
| | L569T/L670T/T692G/A711H/ | | | | |
| | L736M/A750P/A812E/Q830K/ | | | | |
| | G842S/L871E/R883H/Q894G/ | | | | |
| | V913R/S932A | | | | |
| 203/204 | L24W/L28S/L29T/P39Q/Q50V/ | V522E | + | + | |
| | A62L/P78E/D87E/S135Q/T150S/ | | | | |
| | T266N/R267K/A437G/T486E/L569T/ | | | | |
| | L670T/T692G/A711H/L736M/ | | | | |
| | A750P/A812E/Q830K/G842S/ | | | | |
| | L871E/R883H/Q894G/V913R/S932A | | | | |
| 205/206 | L24W/L28R/L29T/P39Q/Q50V/ | S28R | + | + | |
| | A62L/P78E/D87E/S135Q/T150S/ | | | | |
| | T266N/R267K/A437G/T486E/E522V/ | | | | |
| | L569T/L670T/T692G/A711H/ | | | | |
| | L736M/A750P/A812E/Q830K/ | | | | |
| | G842S/L871E/R883H/Q894G/ | | | | |
| | V913R/S932A | | | | |
| 207/208 | L24W/L28S/L29T/P39Q/Q50V/ | E871G | | | ++ |
| | A62L/P78E/D87E/S135Q/T150S/ | | | | |
| | T266N/R267K/A437G/T486E/E522V/ | | | | |
| | L569T/L670T/T692G/A711H/ | | | | |
| | L736M/A750P/A812E/Q830K/ | | | | |
| | G842S/L871G/R883H/Q894G/ | | | | |
| | V913R/S932A | | | | |
| 209/210 | L24W/L28S/L29T/P39Q/Q50V/ | V522I | + | ++ | |
| | A62L/P78E/D87E/S135Q/T150S/ | | | | |
| | T266N/R267K/A437G/T486E/E522I/ | | | | |
| | L569T/L670T/T692G/A711H/ | | | | |
| | L736M/A750P/A812E/Q830K/ | | | | |
| | G842S/L871E/R883H/Q894G/ | | | | |
| | V913R/S932A | | | | |
| 211/212 | L24W/L28S/L29T/P39Q/Q50V/ | H711Y | + | + | + |
| | A62L/P78E/D87E/S135Q/T150S/ | | | | |
| | T266N/R267K/A437G/T486E/ | | | | |
| | E522V/L569T/L670T/T692G/A711Y/ | | | | |
| | L736M/A750P/A812E/Q830K/ | | | | |
| | G842S/L871E/R883H/Q894G/ | | | | |
| | V913R/S932A | | | | |
| 213/214 | L24W/L28S/L29T/P39Q/Q50E/A62L/ | V50E | ++ | ++ | |
| | P78E/D87E/S135Q/T150S/T266N/ | | | | |
| | R267K/A437G/T486E/E522V/ | | | | |
| | L569T/L670T/T692G/A711H/ | | | | |
| | L736M/A750P/A812E/Q830K/ | | | | |
| | G842S/L871E/R883H/Q894G/ | | | | |
| | V913R/S932A | | | | |
| 215/216 | L24W/L28S/L29T/P39Q/Q50V/ | L62V | + | + | |
| | A62V/P78E/D87E/S135Q/T150S/ | | | | |
| | T266N/R267K/A437G/T486E/ | | | | |
| | E522V/L569T/L670T/T692G/ | | | | |
| | A711H/L736M/A750P/A812E/Q830K/ | | | | |
| | G842S/L871E/R883H/Q894G/ | | | | |
| | V913R/S932A | | | | |
| 217/218 | L24W/L28S/L29T/P39Q/Q50V/ | E87S | | | + |
| | A62L/P78E/D87S/S135Q/T150S/ | | | | |
| | T266N/R267K/A437G/T486E/E522V/ | | | | |
| | L569T/L670T/T692G/A711H/ | | | | |
| | L736M/A750P/A812E/Q830K/ | | | | |
| | G842S/L871E/R883H/Q894G/ | | | | |
| | V913R/S932A | | | | |
| 219/220 | L24W/L28S/L29T/P39Q/Q50V/ | L62N | + | + | |
| | A62N/P78E/D87E/S135Q/T150S/ | | | | |
| | T266N/R267K/A437G/T486E/E522V/ | | | | |
| | L569T/L670T/T692G/A711H/ | | | | |
| | L736M/A750P/A812E/Q830K/ | | | | |
| | G842S/L871E/R883H/Q894G/ | | | | |
| | V913R/S932A | | | | |
| 221/222 | L24W/L28S/L29T/P39Q/Q50V/ | E87H | | | ++ |
| | A62L/P78E/D87H/S135Q/T150S/ | | | | |
| | T266N/R267K/A437G/T486E/E522V/ | | | | |
| | L569T/L670T/T692G/A711H/ | | | | |
| | L736M/A750P/A812E/Q830K/ | | | | |
| | G842S/L871E/R883H/Q894G/ | | | | |
| | V913R/S932A | | | | |
| 223/224 | L24W/L28S/L29T/P39Q/Q50V/ | E486L | + | + | ++ |
| | A62L/P78E/D87E/S135Q/T150S/ | | | | |
| | T266N/R267K/A437G/T486L/E522V/ | | | | |
| | L569T/L670T/T692G/A711H/ | | | | |
| | L736M/A750P/A812E/Q830K/ | | | | |
| | G842S/L871E/R883H/Q894G/ | | | | |
| | V913R/S932A | | | | |
| 225/226 | L24W/L28S/L29T/P39Q/Q50V/ | R913E | + | + | |
| | A62L/P78E/D87E/S135Q/T150S/ | | | | |
| | T266N/R267K/A437G/T486E/E522V/ | | | | |
| | L569T/L670T/T692G/A711H/ | | | | |
| | L736M/A750P/A812E/Q830K/ | | | | |
| | G842S/L871E/R883H/Q894G/ | | | | |
| | V913E/S932A | | | | |
| 227/228 | L24W/L28S/L29T/P39Q/Q50V/ | H711R | ++ | ++ | + |
| | A62L/P78E/D87E/S135Q/T150S/ | | | | |
| | T266N/R267K/A437G/T486E/E522V/ | | | | |
| | L569T/L670T/T692G/A711R/ | | | | |
| | L736M/A750P/A812E/Q830K/ | | | | |
| | G842S/L871E/R883H/Q894G/ | | | | |
| | V913R/S932A | | | | |
| 229/230 | L24W/L28S/L29T/P39G/Q50V/ | Q39G | + | + | + |
| | A62L/P78E/D87E/S135Q/T150S/ | | | | |
| | T266N/R267K/A437G/T486E/E522V/ | | | | |
| | L569T/L670T/T692G/A711H/ | | | | |
| | L736M/A750P/A812E/Q830K/ | | | | |
| | G842S/L871E/R883H/Q894G/ | | | | |
| | V913R/S932A | | | | |
| 231/232 | L24R/L28S/L29T/P39Q/Q50V/A62L/ | W24R | +++ | ++ | + |
| | P78E/D87E/S135Q/T150S/T266N/ | | | | |
| | R267K/A437G/T486E/E522V/ | | | | |
| | L569T/L670T/T692G/A711H/ | | | | |
| | L736M/A750P/A812E/Q830K/ | | | | |
| | G842S/L871E/R883H/Q894G/ | | | | |
| | V913R/S932A | | | | |
| 233/234 | L24W/L28S/L29T/P39Q/Q50V/ | N266D | | + | |
| | A62L/P78E/D87E/S135Q/T150S/ | | | | |
| | T266D/R267K/A437G/T486E/E522V/ | | | | |
| | L569T/L670T/T692G/A711H/ | | | | |
| | L736M/A750P/A812E/Q830K/ | | | | |
| | G842S/L871E/R883H/Q894G/ | | | | |
| | V913R/S932A | | | | |
| 235/236 | L24W/L28S/L29T/P39T/Q50V/ | Q39T | + | + | ++ |
| | A62L/P78E/D87E/S135Q/T150S/ | | | | |
| | T266N/R267K/A437G/T486E/E522V/ | | | | |
| | L569T/L670T/T692G/A711H/ | | | | |
| | L736M/A750P/A812E/Q830K/ | | | | |
| | G842S/L871E/R883H/Q894G/ | | | | |
| | V913R/S932A | | | | |
| 237/238 | L24W/L28S/L29T/P39Q/Q50C/ | V50C | ++ | ++ | + |
| | A62L/P78E/D87E/S135Q/T150S/ | | | | |
| | T266N/R267K/A437G/T486E/E522V/ | | | | |
| | L569T/L670T/T692G/A711H/ | | | | |
| | L736M/A750P/A812E/Q830K/ | | | | |
| | G842S/L871E/R883H/Q894G/ | | | | |
| | V913R/S932A | | | | |
| 239/240 | L24A/L28S/L29T/P39Q/Q50V/ | W24A | +++ | +++ | ++ |
| | A62L/P78E/D87E/S135Q/T150S/ | | | | |
| | T266N/R267K/A437G/T486E/E522V/ | | | | |
| | L569T/L670T/T692G/A711H/ | | | | |
| | L736M/A750P/A812E/Q830K/ | | | | |
| | G842S/L871E/R883H/Q894G/ | | | | |
| | V913R/S932A | | | | |
| 241/242 | L24W/L28S/L29T/P39Q/Q50V/ | E87K | | | + |
| | A62L/P78E/D87K/S135Q/T150S/ | | | | |
| | T266N/R267K/A437G/T486E/ | | | | |
| | E522V/L569T/L670T/T692G/A711H/ | | | | |
| | L736M/A750P/A812E/Q830K/ | | | | |
| | G842S/L871E/R883H/Q894G/ | | | | |
| | V913R/S932A | | | | |
| 243/244 | L24W/L28S/L29T/P39Q/Q50V/ | P750A | | + | |
| | A62L/P78E/D87E/S135Q/T150S/ | | | | |
| | T266N/R267K/A437G/T486E/E522V/ | | | | |
| | L569T/L670T/T692G/A711H/ | | | | |
| | L736M/A812E/Q830K/G842S/ | | | | |
| | L871E/R883H/Q894G/V913R/S932A | | | | |
| 245/246 | L24W/L28S/L29E/P39Q/Q50V/ | T29E | + | | |
| | A62L/P78E/D87E/S135Q/T150S/ | | | | |
| | T266N/R267K/A437G/T486E/E522V/ | | | | |
| | L569T/L670T/T692G/A711H/ | | | | |
| | L736M/A750P/A812E/Q830K/ | | | | |
| | G842S/L871E/R883H/Q894G/ | | | | |
| | V913R/S932A | | | | |
| 247/248 | L24W/L28S/L29T/P39Q/Q50V/ | E78L | + | ++ | +++ |
| | A62L/P78L/D87E/S135Q/T150S/ | | | | |
| | T266N/R267K/A437G/T486E/E522V/ | | | | |
| | L569T/L670T/T692G/A711H/ | | | | |
| | L736M/A750P/A812E/Q830K/ | | | | |
| | G842S/L871E/R883H/Q894G/ | | | | |
| | V913R/S932A | | | | |
| 249/250 | L24P/L28S/L29T/P39Q/Q50V/ | W24P | +++ | +++ | ++ |
| | A62L/P78E/D87E/S135Q/T150S/ | | | | |
| | T266N/R267K/A437G/T486E/E522V/ | | | | |
| | L569T/L670T/T692G/A711H/ | | | | |
| | L736M/A750P/A812E/Q830K/ | | | | |
| | G842S/L871E/R883H/Q894G/ | | | | |
| | V913R/S932A | | | | |
| 251/252 | L24D/L28S/L29T/P39Q/Q50V/ | W24D | ++++ | ++++ | +++ |
| | A62L/P78E/D87E/S135Q/T150S/ | | | | |
| | T266N/R267K/A437G/T486E/E522V/ | | | | |
| | L569T/L670T/T692G/A711H/ | | | | |
| | L736M/A750P/A812E/Q830K/ | | | | |
| | G842S/L871E/R883H/Q894G/ | | | | |
| | V913R/S932A | | | | |
| 253/254 | L24W/L28S/L29T/P39Q/Q50V/ | G692K | + | + | |
| | A62L/P78E/D87E/S135Q/T150S/ | | | | |
| | T266N/R267K/A437G/T486E/E522V/ | | | | |
| | L569T/L670T/T692K/A711H/ | | | | |
| | L736M/A750P/A812E/Q830K/ | | | | |
| | G842S/L871E/R883H/Q894G/ | | | | |
| | V913R/S932A | | | | |
| 255/256 | L24W/L28S/L29D/P39Q/Q50V/ | T29D | + | + | |
| | A62L/P78E/D87E/S135Q/T150S/ | | | | |
| | T266N/R267K/A437G/T486E/E522V/ | | | | |
| | L569T/L670T/T692G/A711H/ | | | | |
| | L736M/A750P/A812E/Q830K/ | | | | |
| | G842S/L871E/R883H/Q894G/ | | | | |
| | V913R/S932A | | | | |
| 257/258 | L24W/L28S/L29T/P39Q/Q50Y/ | V50Y | + | + | + |
| | A62L/P78E/D87E/S135Q/T150S/ | | | | |
| | T266N/R267K/A437G/T486E/E522V/ | | | | |
| | L569T/L670T/T692G/A711H/ | | | | |
| | L736M/A750P/A812E/Q830K/ | | | | |
| | G842S/L871E/R883H/Q894G/ | | | | |
| | V913R/S932A | | | | |
| 259/260 | L24W/L28S/L29T/P39Q/Q50V/ | E486K | | | + |
| | A62L/P78E/D87E/S135Q/T150S/ | | | | |
| | T266N/R267K/A437G/T486K/E522V/ | | | | |
| | L569T/L670T/T692G/A711H/ | | | | |
| | L736M/A750P/A812E/Q830K/ | | | | |
| | G842S/L871E/R883H/Q894G/ | | | | |
| | V913R/S932A | | | | |
| 261/262 | L24W/L28F/L29T/P39Q/Q50V/ | S28F | | | ++ |
| | A62L/P78E/D87E/S135Q/T150S/ | | | | |
| | T266N/R267K/A437G/T486E/E522V/ | | | | |
| | L569T/L670T/T692G/A711H/ | | | | |
| | L736M/A750P/A812E/Q830K/ | | | | |
| | G842S/L871E/R883H/Q894G/ | | | | |
| | V913R/S932A | | | | |
| 263/264 | L24W/L28S/L29T/P39Q/Q50V/ | T569S | + | + | |
| | A62L/P78E/D87E/S135Q/T150S/ | | | | |
| | T266N/R267K/A437G/T486E/E522V/ | | | | |
| | L569S/L670T/T692G/A711H/ | | | | |
| | L736M/A750P/A812E/Q830K/ | | | | |
| | G842S/L871E/R883H/Q894G/ | | | | |
| | V913R/S932A | | | | |
| 265/266 | L24W/L28S/L29T/P39Q/Q50V/ | H883Q | | + | |
| | A62L/P78E/D87E/S135Q/T150S/ | | | | |
| | T266N/R267K/A437G/T486E/E522V/ | | | | |
| | L569T/L670T/T692G/A711H/ | | | | |
| | L736M/A750P/A812E/Q830K/ | | | | |
| | G842S/L871E/R883Q/Q894G/ | | | | |
| | V913R/S932A | | | | |
| 267/268 | L24W/L28S/L29T/P39Q/Q50F/ | V50F | + | + | ++ |
| | A62L/P78E/D87E/S135Q/T150S/ | | | | |
| | T266N/R267K/A437G/T486E/E522V/ | | | | |
| | L569T/L670T/T692G/A711H/ | | | | |
| | L736M/A750P/A812E/Q830K/ | | | | |
| | G842S/L871E/R883H/Q894G/ | | | | |
| | V913R/S932A | | | | |
| 269/270 | L24W/L28W/L29T/P39Q/Q50V/ | S28W | | | +++ |
| | A62L/P78E/D87E/S135Q/T150S/ | | | | |
| | T266N/R267K/A437G/T486E/ | | | | |
| | E522V/L569T/L670T/T692G/A711H/ | | | | |
| | L736M/A750P/A812E/Q830K/ | | | | |
| | G842S/L871E/R883H/Q894G/ | | | | |
| | V913R/S932A | | | | |
| 271/272 | L24W/L28S/L29T/P39Q/Q50V/ | K267V | + | + | + |
| | A62L/P78E/D87E/S135Q/T150S/ | | | | |
| | T266N/R267V/A437G/T486E/E522V/ | | | | |
| | L569T/L670T/T692G/A711H/ | | | | |
| | L736M/A750P/A812E/Q830K/ | | | | |
| | G842S/L871E/R883H/Q894G/ | | | | |
| | V913R/S932A | | | | |
| 273/274 | L24W/L28S/L29T/P39Q/Q50V/ | K830E | | ++ | |
| | A62L/P78E/D87E/S135Q/T150S/ | | | | |
| | T266N/R267K/A437G/T486E/E522V/ | | | | |
| | L569T/L670T/T692G/A711H/ | | | | |
| | L736M/A750P/A812E/Q830E/ | | | | |
| | G842S/L871E/R883H/Q894G/ | | | | |
| | V913R/S932A | | | | |
| 275/276 | L24W/L28S/L29T/P39Q/Q50V/ | L62E | + | + | |
| | A62E/P78E/D87E/S135Q/T150S/ | | | | |
| | T266N/R267K/A437G/T486E/E522V/ | | | | |
| | L569T/L670T/T692G/A711H/ | | | | |
| | L736M/A750P/A812E/Q830K/ | | | | |
| | G842S/L871E/R883H/Q894G/ | | | | |
| | V913R/S932A | | | | |
| 277/278 | L24W/L28S/L29T/P39Q/Q50V/ | T569I | + | + | + |
| | A62L/P78E/D87E/S135Q/T150S/ | | | | |
| | T266N/R267K/A437G/T486E/E522V/ | | | | |
| | L569I/L670T/T692G/A711H/ | | | | |
| | L736M/A750P/A812E/Q830K/ | | | | |
| | G842S/L871E/R883H/Q894G/ | | | | |
| | V913R/S932A | | | | |
| 279/280 | L24W/L28V/L29T/P39Q/Q50V/ | S28V | + | + | |
| | A62L/P78E/D87E/S135Q/T150S/ | | | | |
| | T266N/R267K/A437G/T486E/E522V/ | | | | |
| | L569T/L670T/T692G/A711H/ | | | | |
| | L736M/A750P/A812E/Q830K/ | | | | |
| | G842S/L871E/R883H/Q894G/ | | | | |
| | V913R/S932A | | | | |
| 281/282 | L24W/L28S/L29T/P39Q/Q50V/ | E486V | + | ++ | +++ |
| | A62L/P78E/D87E/S135Q/T150S/ | | | | |
| | T266N/R267K/A437G/T486V/E522V/ | | | | |
| | L569T/L670T/T692G/A711H/ | | | | |
| | L736M/A750P/A812E/Q830K/ | | | | |
| | G842S/L871E/R883H/Q894G/ | | | | |
| | V913R/S932A | | | | |
| 283/284 | L24W/L28S/L29T/P39Q/Q50V/ | E871V | + | ++ | +++ |
| | A62L/P78E/D87E/S135Q/T150S/ | | | | |
| | T266N/R267K/A437G/T486E/E522V/ | | | | |
| | L569T/L670T/T692G/A711H/ | | | | |
| | L736M/A750P/A812E/Q830K/ | | | | |
| | G842S/L871V/R883H/Q894G/ | | | | |
| | V913R/S932A | | | | |
| 285/286 | L24W/L28S/L29S/P39Q/Q50V/A62L/ | T29S | ++ | + | + |
| | P78E/D87E/S135Q/T150S/T266N/ | | | | |
| | R267K/A437G/T486E/E522V/ | | | | |
| | L569T/L670T/T692G/A711H/ | | | | |
| | L736M/A750P/A812E/Q830K/ | | | | |
| | G842S/L871E/R883H/Q894G/ | | | | |
| | V913R/S932A | | | | |
| 287/288 | L24W/L28C/L29T/P39Q/Q50V/ | S28C | | + | |
| | A62L/P78E/D87E/S135Q/T150S/ | | | | |
| | T266N/R267K/A437G/T486E/E522V/ | | | | |
| | L569T/L670T/T692G/A711H/ | | | | |
| | L736M/A750P/A812E/Q830K/ | | | | |
| | G842S/L871E/R883H/Q894G/ | | | | |
| | V913R/S932A | | | | |
| 289/290 | L24W/L28S/L29T/P39Q/Q50V/ | K830L | + | + | |
| | A62L/P78E/D87E/S135Q/T150S/ | | | | |
| | T266N/R267K/A437G/T486E/E522V/ | | | | |
| | L569T/L670T/T692G/A711H/ | | | | |
| | L736M/A750P/A812E/Q830L/ | | | | |
| | G842S/L871E/R883H/Q894G/ | | | | |
| | V913R/S932A | | | | |
| 291/292 | L24W/L28K/L29T/P39Q/Q50V/ | S28K | + | + | |
| | A62L/P78E/D87E/S135Q/T150S/ | | | | |
| | T266N/R267K/A437G/T486E/E522V/ | | | | |
| | L569T/L670T/T692G/A711H/ | | | | |
| | L736M/A750P/A812E/Q830K/ | | | | |
| | G842S/L871E/R883H/Q894G/ | | | | |
| | V913R/S932A | | | | |
| 293/294 | L24W/L28S/L29T/P39Q/Q50V/ | E871N | | + | ++ |
| | A62L/P78E/D87E/S135Q/T150S/ | | | | |
| | T266N/R267K/A437G/T486E/E522V/ | | | | |
| | L569T/L670T/T692G/A711H/ | | | | |
| | L736M/A750P/A812E/Q830K/ | | | | |
| | G842S/L871N/R883H/Q894G/ | | | | |
| | V913R/S932A | | | | |
| 295/296 | L24W/L28S/L29T/P39Q/Q50L/A62L/ | V50L | ++ | ++ | + |
| | P78E/D87E/S135Q/T150S/T266N/ | | | | |
| | R267K/A437G/T486E/E522V/ | | | | |
| | L569T/L670T/T692G/A711H/ | | | | |
| | L736M/A750P/A812E/Q830K/ | | | | |
| | G842S/L871E/R883H/Q894G/ | | | | |
| | V913R/S932A | | | | |
| 297/298 | L24W/L28S/L29T/P39Q/Q50V/ | A932Q | ++ | + | ++ |
| | A62L/P78E/D87E/S135Q/T150S/ | | | | |
| | T266N/R267K/A437G/T486E/E522V/ | | | | |
| | L569T/L670T/T692G/A711H/ | | | | |
| | L736M/A750P/A812E/Q830K/ | | | | |
| | G842S/L871E/R883H/Q894G/ | | | | |
| | V913R/S932Q | | | | |
| 299/300 | L24W/L28S/P39Q/Q50V/A62L/ | T29L | + | | ++ |
| | P78E/D87E/S135Q/T150S/T266N/ | | | | |
| | R267K/A437G/T486E/E522V/L569T/ | | | | |
| | L670T/T692G/A711H/L736M/ | | | | |
| | A750P/A812E/Q830K/G842S/ | | | | |
| | L871E/R883H/Q894G/V913R/S932A | | | | |
| 301/302 | L24W/L28S/L29T/P39Q/Q50V/ | H711F | + | + | ++ |
| | A62L/P78E/D87E/S135Q/T150S/ | | | | |
| | T266N/R267K/A437G/T486E/E522V/ | | | | |
| | L569T/L670T/T692G/A711F/ | | | | |
| | L736M/A750P/A812E/Q830K/ | | | | |
| | G842S/L871E/R883H/Q894G/ | | | | |
| | V913R/S932A | | | | |
| 303/304 | L24W/L28S/L29T/P39Q/Q50V/ | T569E | ++ | + | + |
| | A62L/P78E/D87E/S135Q/T150S/ | | | | |
| | T266N/R267K/A437G/T486E/E522V/ | | | | |
| | L569E/L670T/T692G/A711H/ | | | | |
| | L736M/A750P/A812E/Q830K/ | | | | |
| | G842S/L871E/R883H/Q894G/ | | | | |
| | V913R/S932A | | | | |
| 305/306 | L24W/L28S/L29T/P39Q/Q50V/ | E78F | | + | + |
| | A62L/P78F/D87E/S135Q/T150S/ | | | | |
| | T266N/R267K/A437G/T486E/E522V/ | | | | |
| | L569T/L670T/T692G/A711H/ | | | | |
| | L736M/A750P/A812E/Q830K/ | | | | |
| | G842S/L871E/R883H/Q894G/ | | | | |
| | V913R/S932A | | | | |
| 307/308 | L24W/L28S/L29T/P39Q/Q50V/ | V522R | + | | |
| | A62L/P78E/D87E/S135Q/T150S/ | | | | |
| | T266N/R267K/A437G/T486E/E522R/ | | | | |
| | L569T/L670T/T692G/A711H/ | | | | |
| | L736M/A750P/A812E/Q830K/ | | | | |
| | G842S/L871E/R883H/Q894G/ | | | | |
| | V913R/S932A | | | | |
| 309/310 | L24W/L28S/L29T/P39Q/Q50V/ | H711E | + | + | + |
| | A62L/P78E/D87E/S135Q/T150S/ | | | | |
| | T266N/R267K/A437G/T486E/E522V/ | | | | |
| | L569T/L670T/T692G/A711E/ | | | | |
| | L736M/A750P/A812E/Q830K/ | | | | |
| | G842S/L871E/R883H/Q894G/ | | | | |
| | V913R/S932A | | | | |
| 311/312 | L24W/L28S/L29T/P39Q/Q50V/ | S842F | + | | |
| | A62L/P78E/D87E/S135Q/T150S/ | | | | |
| | T266N/R267K/A437G/T486E/E522V/ | | | | |
| | L569T/L670T/T692G/A711H/ | | | | |
| | L736M/A750P/A812E/Q830K/ | | | | |
| | G842F/L871E/R883H/Q894G/ | | | | |
| | V913R/S932A | | | | |
| 313/314 | L24W/L28S/L29T/P39Q/Q50N/ | V50N | ++ | ++ | |
| | A62L/P78E/D87E/S135Q/T150S/ | | | | |
| | T266N/R267K/A437G/T486E/E522V/ | | | | |
| | L569T/L670T/T692G/A711H/ | | | | |
| | L736M/A750P/A812E/Q830K/ | | | | |
| | G842S/L871E/R883H/Q894G/ | | | | |
| | V913R/S932A | | | | |
| 315/316 | L24W/L28S/L29T/P39Q/Q50V/ | Q135D | + | + | + |
| | A62L/P78E/D87E/S135D/T150S/ | | | | |
| | T266N/R267K/A437G/T486E/E522V/ | | | | |
| | L569T/L670T/T692G/A711H/ | | | | |
| | L736M/A750P/A812E/Q830K/ | | | | |
| | G842S/L871E/R883H/Q894G/ | | | | |
| | V913R/S932A | | | | |
| 317/318 | L24W/L28S/L29T/P39Q/Q50V/ | K267R | | + | |
| | A62L/P78E/D87E/S135Q/T150S/ | | | | |
| | T266N/A437G/T486E/E522V/L569T/ | | | | |
| | L670T/T692G/A711H/L736M/ | | | | |
| | A750P/A812E/Q830K/G842S/ | | | | |
| | L871E/R883H/Q894G/V913R/S932A | | | | |
| 319/320 | L24W/L28S/L29T/P39Q/Q50V/ | E78S | + | + | +++ |
| | A62L/P78S/D87E/S135Q/T150S/ | | | | |
| | T266N/R267K/A437G/T486E/E522V/ | | | | |
| | L569T/L670T/T692G/A711H/ | | | | |
| | L736M/A750P/A812E/Q830K/ | | | | |
| | G842S/L871E/R883H/Q894G/ | | | | |
| | V913R/S932A | | | | |
| 321/322 | L24V/L28S/L29T/P39Q/Q50V/A62L/ | W24V | +++ | +++ | ++ |
| | P78E/D87E/S135Q/T150S/T266N/ | | | | |
| | R267K/A437G/T486E/E522V/ | | | | |
| | L569T/L670T/T692G/A711H/ | | | | |
| | L736M/A750P/A812E/Q830K/ | | | | |
| | G842S/L871E/R883H/Q894G/ | | | | |
| | V913R/S932A | | | | |
| 323/324 | L24W/L28S/L29T/P39Q/Q50V/ | R913S | + | + | + |
| | A62L/P78E/D87E/S135Q/T150S/ | | | | |
| | T266N/R267K/A437G/T486E/E522V/ | | | | |
| | L569T/L670T/T692G/A711H/ | | | | |
| | L736M/A750P/A812E/Q830K/ | | | | |
| | G842S/L871E/R883H/Q894G/ | | | | |
| | V913S/S932A | | | | |
| 325/326 | L24W/L28S/L29T/P39Q/Q50V/ | E78M | + | + | + |
| | A62L/P78M/D87E/S135Q/T150S/ | | | | |
| | T266N/R267K/A437G/T486E/E522V/ | | | | |
| | L569T/L670T/T692G/A711H/ | | | | |
| | L736M/A750P/A812E/Q830K/ | | | | |
| | G842S/L871E/R883H/Q894G/ | | | | |
| | V913R/S932A | | | | |
| 327/328 | L24W/L28S/L29T/P39Q/Q50R/A62L/ | V50R | ++ | ++ | ++ |
| | P78E/D87E/S135Q/T150S/T266N/ | | | | |
| | R267K/A437G/T486E/E522V/ | | | | |
| | L569T/L670T/T692G/A711H/ | | | | |
| | L736M/A750P/A812E/Q830K/ | | | | |
| | G842S/L871E/R883H/Q894G/ | | | | |
| | V913R/S932A | | | | |
| 329/330 | L24W/L28S/L29T/P39Q/Q50V/ | T670Q | + | + | |
| | A62L/P78E/D87E/S135Q/T150S/ | | | | |
| | T266N/R267K/A437G/T486E/ | | | | |
| | E522V/L569T/L670Q/T692G/A711H/ | | | | |
| | L736M/A750P/A812E/Q830K/ | | | | |
| | G842S/L871E/R883H/Q894G/ | | | | |
| | V913R/S932A | | | | |
| 331/332 | L24W/L28S/L29T/P39Q/Q50V/ | L62T | | + | |
| | A62T/P78E/D87E/S135Q/T150S/ | | | | |
| | T266N/R267K/A437G/T486E/E522V/ | | | | |
| | L569T/L670T/T692G/A711H/ | | | | |
| | L736M/A750P/A812E/Q830K/ | | | | |
| | G842S/L871E/R883H/Q894G/ | | | | |
| | V913R/S932A | | | | |
| 333/334 | L24W/L28S/L29T/P39Q/Q50V/ | G894M | + | + | |
| | A62L/P78E/D87E/S135Q/T150S/ | | | | |
| | T266N/R267K/A437G/T486E/E522V/ | | | | |
| | L569T/L670T/T692G/A711H/ | | | | |
| | L736M/A750P/A812E/Q830K/ | | | | |
| | G842S/L871E/R883H/Q894M/ | | | | |
| | V913R/S932A | | | | |
| 335/336 | L24W/L28S/L29T/P39Q/Q50K/ | V50K | ++ | ++ | + |
| | A62L/P78E/D87E/S135Q/T150S/ | | | | |
| | T266N/R267K/A437G/T486E/E522V/ | | | | |
| | L569T/L670T/T692G/A711H/ | | | | |
| | L736M/A750P/A812E/Q830K/ | | | | |
| | G842S/L871E/R883H/Q894G/ | | | | |
| | V913R/S932A | | | | |
| 337/338 | L24W/L28S/L29T/P39Q/Q50V/ | E78N | + | + | + |
| | A62L/P78N/D87E/S135Q/T150S/ | | | | |
| | T266N/R267K/A437G/T486E/E522V/ | | | | |
| | L569T/L670T/T692G/A711H/ | | | | |
| | L736M/A750P/A812E/Q830K/ | | | | |
| | G842S/L871E/R883H/Q894G/ | | | | |
| | V913R/S932A | | | | |
| 339/340 | L24W/L28S/L29T/P39Q/Q50V/ | P750L | | + | |
| | A62L/P78E/D87E/S135Q/T150S/ | | | | |
| | T266N/R267K/A437G/T486E/E522V/ | | | | |
| | L569T/L670T/T692G/A711H/ | | | | |
| | L736M/A750L/A812E/Q830K/ | | | | |
| | G842S/L871E/R883H/Q894G/ | | | | |
| | V913R/S932A | | | | |
| 341/342 | L24W/L28S/L29T/P39Q/Q50V/ | P750R | | | + |
| | A62L/P78E/D87E/S135Q/T150S/ | | | | |
| | T266N/R267K/A437G/T486E/E522V/ | | | | |
| | L569T/L670T/T692G/A711H/ | | | | |
| | L736M/A750R/A812E/Q830K/ | | | | |
| | G842S/L871E/R883H/Q894G/ | | | | |
| | V913R/S932A | | | | |
| 343/344 | L24W/L28S/L29T/P39Q/Q50V/ | T569D | | + | |
| | A62L/P78E/D87E/S135Q/T150S/ | | | | |
| | T266N/R267K/A437G/T486E/E522V/ | | | | |
| | L569D/L670T/T692G/A711H/ | | | | |
| | L736M/A750P/A812E/Q830K/ | | | | |
| | G842S/L871E/R883H/Q894G/ | | | | |
| | V913R/S932A | | | | |
| 345/346 | L24I/L28S/L29T/P39Q/Q50V/A62L/ | W24I | +++ | ++ | + |
| | P78E/D87E/S135Q/T150S/T266N/ | | | | |
| | R267K/A437G/T486E/E522V/ | | | | |
| | L569T/L670T/T692G/A711H/ | | | | |
| | L736M/A750P/A812E/Q830K/ | | | | |
| | G842S/L871E/R883H/Q894G/ | | | | |
| | V913R/S932A | | | | |
| 347/348 | L24W/L28S/L29T/P39Q/Q50V/ | E486N | + | ++ | +++ |
| | A62L/P78E/D87E/S135Q/T150S/ | | | | |
| | T266N/R267K/A437G/T486N/E522V/ | | | | |
| | L569T/L670T/T692G/A711H/ | | | | |
| | L736M/A750P/A812E/Q830K/ | | | | |
| | G842S/L871E/R883H/Q894G/ | | | | |
| | V913R/S932A | | | | |
| 349/350 | L24W/L28S/L29T/P39Q/Q50V/ | G894V | + | ++ | |
| | A62L/P78E/D87E/S135Q/T150S/ | | | | |
| | T266N/R267K/A437G/T486E/E522V/ | | | | |
| | L569T/L670T/T692G/A711H/ | | | | |
| | L736M/A750P/A812E/Q830K/ | | | | |
| | G842S/L871E/R883H/Q894V/ | | | | |
| | V913R/S932A | | | | |
| 351/352 | L24W/L28S/L29T/P39Q/Q50V/ | K830D | + | + | |
| | A62L/P78E/D87E/S135Q/T150S/ | | | | |
| | T266N/R267K/A437G/T486E/E522V/ | | | | |
| | L569T/L670T/T692G/A711H/ | | | | |
| | L736M/A750P/A812E/Q830D/ | | | | |
| | G842S/L871E/R883H/Q894G/ | | | | |
| | V913R/S932A | | | | |
| 353/354 | L24W/L28S/L29T/P39Q/Q50V/ | G894W | + | + | |
| | A62L/P78E/D87E/S135Q/T150S/ | | | | |
| | T266N/R267K/A437G/T486E/E522V/ | | | | |
| | L569T/L670T/T692G/A711H/ | | | | |
| | L736M/A750P/A812E/Q830K/ | | | | |
| | G842S/L871E/R883H/Q894W/ | | | | |
| | V913R/S932A | | | | |
| 355/356 | L24W/L28S/L29T/P39Q/Q50V/ | E78V | + | + | + |
| | A62L/P78V/D87E/S135Q/T150S/ | | | | |
| | T266N/R267K/A437G/T486E/E522V/ | | | | |
| | L569T/L670T/T692G/A711H/ | | | | |
| | L736M/A750P/A812E/Q830K/ | | | | |
| | G842S/L871E/R883H/Q894G/ | | | | |
| | V913R/S932A | | | | |
| 357/358 | L24W/L28S/L29T/P39Q/Q50V/ | V522A | + | | + |
| | A62L/P78E/D87E/S135Q/T150S/ | | | | |
| | T266N/R267K/A437G/T486E/E522A/ | | | | |
| | L569T/L670T/T692G/A711H/ | | | | |
| | L736M/A750P/A812E/Q830K/ | | | | |
| | G842S/L871E/R883H/Q894G/ | | | | |
| | V913R/S932A | | | | |
| 359/360 | L24W/L28S/L29T/P39Q/Q50V/ | T670M | + | + | |
| | A62L/P78E/D87E/S135Q/T150S/ | | | | |
| | T266N/R267K/A437G/T486E/E522V/ | | | | |
| | L569T/L670M/T692G/A711H/ | | | | |
| | L736M/A750P/A812E/Q830K/ | | | | |
| | G842S/L871E/R883H/Q894G/ | | | | |
| | V913R/S932A | | | | |
| 361/362 | L24W/L28S/L29T/P39Q/Q50V/ | L62Y | | + | |
| | A62Y/P78E/D87E/S135Q/T150S/ | | | | |
| | T266N/R267K/A437G/T486E/E522V/ | | | | |
| | L569T/L670T/T692G/A711H/ | | | | |
| | L736M/A750P/A812E/Q830K/ | | | | |
| | G842S/L871E/R883H/Q894G/ | | | | |
| | V913R/S932A | | | | |
| 363/364 | L24W/L29T/P39Q/Q50V/A62L/ | S28L | + | | + |
| | P78E/D87E/S135Q/T150S/T266N/ | | | | |
| | R267K/A437G/T486E/E522V/ | | | | |
| | L569T/L670T/T692G/A711H/L736M/ | | | | |
| | A750P/A812E/Q830K/G842S/ | | | | |
| | L871E/R883H/Q894G/V913R/ | | | | |
| | S932A | | | | |
| 365/366 | L24W/L28S/L29T/P39Q/Q50V/ | P750K | + | + | ++ |
| | A62L/P78E/D87E/S135Q/T150S/ | | | | |
| | T266N/R267K/A437G/T486E/E522V/ | | | | |
| | L569T/L670T/T692G/A711H/ | | | | |
| | L736M/A750K/A812E/Q830K/ | | | | |
| | G842S/L871E/R883H/Q894G/ | | | | |
| | V913R/S932A | | | | |
| 367/368 | L24W/L28S/L29T/P39Q/Q50V/ | E78A | + | ++ | +++ |
| | A62L/P78A/D87E/S135Q/T150S/ | | | | |
| | T266N/R267K/A437G/T486E/E522V/ | | | | |
| | L569T/L670T/T692G/A711H/ | | | | |
| | L736M/A750P/A812E/Q830K/ | | | | |
| | G842S/L871E/R883H/Q894G/ | | | | |
| | V913R/S932A | | | | |
| 369/370 | L24W/L28S/L29T/P39Q/Q50G/ | V50G | ++ | + | |
| | A62L/P78E/D87E/S135Q/T150S/ | | | | |
| | T266N/R267K/A437G/T486E/E522V/ | | | | |
| | L569T/L670T/T692G/A711H/ | | | | |
| | L736M/A750P/A812E/Q830K/ | | | | |
| | G842S/L871E/R883H/Q894G/ | | | | |
| | V913R/S932A | | | | |
| 371/372 | L24W/L28S/L29T/P39Q/Q50V/ | G894K | + | + | |
| | A62L/P78E/D87E/S135Q/T150S/ | | | | |
| | T266N/R267K/A437G/T486E/E522V/ | | | | |
| | L569T/L670T/T692G/A711H/ | | | | |
| | L736M/A750P/A812E/Q830K/ | | | | |
| | G842S/L871E/R883H/Q894K/ | | | | |
| | V913R/S932A | | | | |
| 373/374 | L24W/L28S/L29T/P39Q/Q50V/ | G437S | + | + | |
| | A62L/P78E/D87E/S135Q/T150S/ | | | | |
| | T266N/R267K/A437S/T486E/E522V/ | | | | |
| | L569T/L670T/T692G/A711H/ | | | | |
| | L736M/A750P/A812E/Q830K/ | | | | |
| | G842S/L871E/R883H/Q894G/ | | | | |
| | V913R/S932A | | | | |
| 375/376 | L24W/L28S/L29T/P39Q/Q50V/ | G692E | | + | |
| | A62L/P78E/D87E/S135Q/T150S/ | | | | |
| | T266N/R267K/A437G/T486E/E522V/ | | | | |
| | L569T/L670T/T692E/A711H/ | | | | |
| | L736M/A750P/A812E/Q830K/ | | | | |
| | G842S/L871E/R883H/Q894G/ | | | | |
| | V913R/S932A | | | | |
| 377/378 | L24W/L28S/L29T/P39Q/Q50V/ | T569P | | + | |
| | A62L/P78E/D87E/S135Q/T150S/ | | | | |
| | T266N/R267K/A437G/T486E/E522V/ | | | | |
| | L569P/L670T/T692G/A711H/ | | | | |
| | L736M/A750P/A812E/Q830K/ | | | | |
| | G842S/L871E/R883H/Q894G/ | | | | |
| | V913R/S932A | | | | |
| 379/380 | L24W/L28S/L29T/P39Q/Q50V/ | T569N | | + | |
| | A62L/P78E/D87E/S135Q/T150S/ | | | | |
| | T266N/R267K/A437G/T486E/ | | | | |
| | E522V/L569N/L670T/T692G/ | | | | |
| | A711H/L736M/A750P/A812E/Q830K/ | | | | |
| | G842S/L871E/R883H/Q894G/ | | | | |
| | V913R/S932A | | | | |
| 381/382 | L24W/L28S/L29T/P39Q/Q50V/ | E87D | + | + | + |
| | A62L/P78E/S135Q/T150S/T266N/ | | | | |
| | R267K/A437G/T486E/E522V/ | | | | |
| | L569T/L670T/T692G/A711H/L736M/ | | | | |
| | A750P/A812E/Q830K/G842S/ | | | | |
| | L871E/R883H/Q894G/V913R/ | | | | |
| | S932A | | | | |
| 383/384 | L24W/L28S/L29T/P39Q/Q50V/ | Q135N | | + | |
| | A62L/P78E/D87E/S135N/T150S/ | | | | |
| | T266N/R267K/A437G/T486E/E522V/ | | | | |
| | L569T/L670T/T692G/A711H/ | | | | |
| | L736M/A750P/A812E/Q830K/ | | | | |
| | G842S/L871E/R883H/Q894G/ | | | | |
| | V913R/S932A | | | | |
| 385/386 | L24W/L28S/L29T/P39Q/Q50V/ | V522Y | + | | |
| | A62L/P78E/D87E/S135Q/T150S/ | | | | |
| | T266N/R267K/A437G/T486E/E522Y/ | | | | |
| | L569T/L670T/T692G/A711H/ | | | | |
| | L736M/A750P/A812E/Q830K/ | | | | |
| | G842S/L871E/R883H/Q894G/ | | | | |
| | V913R/S932A | | | | |
| 387/388 | L24W/L28S/L29T/P39Q/Q50V/ | G437A | + | + | ++ |
| | A62L/P78E/D87E/S135Q/T150S/ | | | | |
| | T266N/R267K/T486E/E522V/L569T/ | | | | |
| | L670T/T692G/A711H/L736M/ | | | | |
| | A750P/A812E/Q830K/G842S/ | | | | |
| | L871E/R883H/Q894G/V913R/S932A | | | | |
| 389/390 | L24W/L28S/L29T/P39Q/Q50V/ | M736F | + | + | |
| | A62L/P78E/D87E/S135Q/T150S/ | | | | |
| | T266N/R267K/A437G/T486E/E522V/ | | | | |
| | L569T/L670T/T692G/A711H/ | | | | |
| | L736F/A750P/A812E/Q830K/ | | | | |
| | G842S/L871E/R883H/Q894G/ | | | | |
| | V913R/S932A | | | | |
| 391/392 | L24W/L28S/L29T/P39Q/Q50V/ | A932T | + | + | ++ |
| | A62L/P78E/D87E/S135Q/T150S/ | | | | |
| | T266N/R267K/A437G/T486E/E522V/ | | | | |
| | L569T/L670T/T692G/A711H/ | | | | |
| | L736M/A750P/A812E/Q830K/ | | | | |
| | G842S/L871E/R883H/Q894G/ | | | | |
| | V913R/S932T | | | | |
| 393/394 | L24G/L28S/L29T/P39Q/Q50V/A62L/ | W24G | ++++ | +++ | +++ |
| | P78E/D87E/S135Q/T150S/T266N/ | | | | |
| | R267K/A437G/T486E/E522V/ | | | | |
| | L569T/L670T/T692G/A711H/ | | | | |
| | L736M/A750P/A812E/Q830K/ | | | | |
| | G842S/L871E/R883H/Q894G/ | | | | |
| | V913R/S932A | | | | |
| 395/396 | L24W/L28S/L29T/P39Q/Q50V/ | S842K | + | + | + |
| | A62L/P78E/D87E/S135Q/T150S/ | | | | |
| | T266N/R267K/A437G/T486E/E522V/ | | | | |
| | L569T/L670T/T692G/A711H/ | | | | |
| | L736M/A750P/A812E/Q830K/ | | | | |
| | G842K/L871E/R883H/Q894G/ | | | | |
| | V913R/S932A | | | | |
| 397/398 | L24W/L28S/L29T/P39Q/Q50V/ | A932W | | + | + |
| | A62L/P78E/D87E/S135Q/T150S/ | | | | |
| | T266N/R267K/A437G/T486E/E522V/ | | | | |
| | L569T/L670T/T692G/A711H/ | | | | |
| | L736M/A750P/A812E/Q830K/ | | | | |
| | G842S/L871E/R883H/Q894G/ | | | | |
| | V913R/S932W | | | | |
| 399/400 | L24W/L28S/L29T/P39Q/Q50V/ | G692Q | + | + | |
| | A62L/P78E/D87E/S135Q/T150S/ | | | | |
| | T266N/R267K/A437G/T486E/E522V/ | | | | |
| | L569T/L670T/T692Q/A711H/ | | | | |
| | L736M/A750P/A812E/Q830K/ | | | | |
| | G842S/L871E/R883H/Q894G/ | | | | |
| | V913R/S932A | | | | |
| 401/402 | L24W/L28S/L29T/P39Q/Q50V/ | Q135F | + | + | |
| | A62L/P78E/D87E/S135F/T150S/ | | | | |
| | T266N/R267K/A437G/T486E/E522V/ | | | | |
| | L569T/L670T/T692G/A711H/ | | | | |
| | L736M/A750P/A812E/Q830K/ | | | | |
| | G842S/L871E/R883H/Q894G/ | | | | |
| | V913R/S932A | | | | |
| 403/404 | L24W/L28S/L29T/P39Q/Q50V/ | E78P | + | ++ | +++ |
| | A62L/D87E/S135Q/T150S/T266N/ | | | | |
| | R267K/A437G/T486E/E522V/ | | | | |
| | L569T/L670T/T692G/A711H/L736M/ | | | | |
| | A750P/A812E/Q830K/G842S/ | | | | |
| | L871E/R883H/Q894G/V913R/S932A | | | | |
| 405/406 | L24W/L28S/L29T/P39Q/Q50V/ | E871F | + | + | + |
| | A62L/P78E/D87E/S135Q/T150S/ | | | | |
| | T266N/R267K/A437G/T486E/E522V/ | | | | |
| | L569T/L670T/T692G/A711H/ | | | | |
| | L736M/A750P/A812E/Q830K/ | | | | |
| | G842S/L871F/R883H/Q894G/ | | | | |
| | V913R/S932A | | | | |
| 407/408 | L24W/L28S/L29T/P39Q/Q50V/ | T670Y | + | + | ++ |
| | A62L/P78E/D87E/S135Q/T150S/ | | | | |
| | T266N/R267K/A437G/T486E/E522V/ | | | | |
| | L569T/L670Y/T692G/A711H/ | | | | |
| | L736M/A750P/A812E/Q830K/ | | | | |
| | G842S/L871E/R883H/Q894G/ | | | | |
| | V913R/S932A | | | | |
| 409/410 | L24W/L28S/L29T/P39Q/Q50V/ | G692L | + | + | +++ |
| | A62L/P78E/D87E/S135Q/T150S/ | | | | |
| | T266N/R267K/A437G/T486E/E522V/ | | | | |
| | L569T/L670T/T692L/A711H/ | | | | |
| | L736M/A750P/A812E/Q830K/ | | | | |
| | G842S/L871E/R883H/Q894G/ | | | | |
| | V913R/S932A | | | | |
| 411/412 | L24W/L28S/L29T/P39Q/Q50V/ | Q135E | + | + | |
| | A62L/P78E/D87E/S135E/T150S/ | | | | |
| | T266N/R267K/A437G/T486E/E522V/ | | | | |
| | L569T/L670T/T692G/A711H/ | | | | |
| | L736M/A750P/A812E/Q830K/ | | | | |
| | G842S/L871E/R883H/Q894G/ | | | | |
| | V913R/S932A | | | | |
| 413/414 | L24W/L28S/L29T/P39Q/Q50V/ | T670F | + | + | |
| | A62L/P78E/D87E/S135Q/T150S/ | | | | |
| | T266N/R267K/A437G/T486E/E522V/ | | | | |
| | L569T/L670F/T692G/A711H/ | | | | |
| | L736M/A750P/A812E/Q830K/ | | | | |
| | G842S/L871E/R883H/Q894G/ | | | | |
| | V913R/S932A | | | | |
| 415/416 | L24W/L28S/L29T/P39Q/Q50H/ | V50H | ++ | ++ | ++ |
| | A62L/P78E/D87E/S135Q/T150S/ | | | | |
| | T266N/R267K/A437G/T486E/E522V/ | | | | |
| | L569T/L670T/T692G/A711H/ | | | | |
| | L736M/A750P/A812E/Q830K/ | | | | |
| | G842S/L871E/R883H/Q894G/ | | | | |
| | V913R/S932A | | | | |
| 417/418 | L24W/L28S/L29T/P39Q/Q50V/ | E87I | | | + |
| | A62L/P78E/D87I/S135Q/T150S/ | | | | |
| | T266N/R267K/A437G/T486E/E522V/ | | | | |
| | L569T/L670T/T692G/A711H/ | | | | |
| | L736M/A750P/A812E/Q830K/ | | | | |
| | G842S/L871E/R883H/Q894G/ | | | | |
| | V913R/S932A | | | | |
| 419/420 | L24W/L28P/L29T/P39Q/Q50V/ | S28P | | | + |
| | A62L/P78E/D87E/S135Q/T150S/ | | | | |
| | T266N/R267K/A437G/T486E/E522V/ | | | | |
| | L569T/L670T/T692G/A711H/ | | | | |
| | L736M/A750P/A812E/Q830K/ | | | | |
| | G842S/L871E/R883H/Q894G/ | | | | |
| | V913R/S932A | | | | |
| 421/422 | L24W/L28S/L29T/P39Q/Q50V/ | H883F | | + | |
| | A62L/P78E/D87E/S135Q/T150S/ | | | | |
| | T266N/R267K/A437G/T486E/E522V/ | | | | |
| | L569T/L670T/T692G/A711H/ | | | | |
| | L736M/A750P/A812E/Q830K/ | | | | |
| | G842S/L871E/R883F/Q894G/ | | | | |
| | V913R/S932A | | | | |
| 423/424 | L24W/L28S/L29T/P39Q/Q50V/ | G437H | + | + | |
| | A62L/P78E/D87E/S135Q/T150S/ | | | | |
| | T266N/R267K/A437H/T486E/E522V/ | | | | |
| | L569T/L670T/T692G/A711H/ | | | | |
| | L736M/A750P/A812E/Q830K/ | | | | |
| | G842S/L871E/R883H/Q894G/ | | | | |
| | V913R/S932A | | | | |
| 425/426 | L24W/L28S/L29T/P39Q/Q50V/ | L62I | | + | |
| | A62I/P78E/D87E/S135Q/T150S/ | | | | |
| | T266N/R267K/A437G/T486E/E522V/ | | | | |
| | L569T/L670T/T692G/A711H/ | | | | |
| | L736M/A750P/A812E/Q830K/ | | | | |
| | G842S/L871E/R883H/Q894G/ | | | | |
| | V913R/S932A | | | | |
| 427/428 | L24W/L28S/L29T/P39Q/Q50V/ | K830W | + | + | |
| | A62L/P78E/D87E/S135Q/T150S/ | | | | |
| | T266N/R267K/A437G/T486E/E522V/ | | | | |
| | L569T/L670T/T692G/A711H/ | | | | |
| | L736M/A750P/A812E/Q830W/ | | | | |
| | G842S/L871E/R883H/Q894G/ | | | | |
| | V913R/S932A | | | | |
| 429/430 | L24W/L28S/L29T/P39Q/Q50V/ | G692S | + | + | |
| | A62L/P78E/D87E/S135Q/T150S/ | | | | |
| | T266N/R267K/A437G/T486E/E522V/ | | | | |
| | L569T/L670T/T692S/A711H/ | | | | |
| | L736M/A750P/A812E/Q830K/ | | | | |
| | G842S/L871E/R883H/Q894G/ | | | | |
| | V913R/S932A | | | | |
| 431/432 | L24W/L28S/L29K/P39Q/Q50V/ | T29K | + | | |
| | A62L/P78E/D87E/S135Q/T150S/ | | | | |
| | T266N/R267K/A437G/T486E/E522V/ | | | | |
| | L569T/L670T/T692G/A711H/ | | | | |
| | L736M/A750P/A812E/Q830K/ | | | | |
| | G842S/L871E/R883H/Q894G/ | | | | |
| | V913R/S932A | | | | |
| 433/434 | L24W/L28S/L29T/P39Q/Q50V/ | T670E | + | + | |
| | A62L/P78E/D87E/S135Q/T150S/ | | | | |
| | T266N/R267K/A437G/T486E/E522V/ | | | | |
| | L569T/L670E/T692G/A711H/ | | | | |
| | L736M/A750P/A812E/Q830K/ | | | | |
| | G842S/L871E/R883H/Q894G/ | | | | |
| | V913R/S932A | | | | |
| 435/436 | L24W/L28S/L29T/P39Q/Q50V/ | E486R | + | + | ++ |
| | A62L/P78E/D87E/S135Q/T150S/ | | | | |
| | T266N/R267K/A437G/T486R/E522V/ | | | | |
| | L569T/L670T/T692G/A711H/ | | | | |
| | L736M/A750P/A812E/Q830K/ | | | | |
| | G842S/L871E/R883H/Q894G/ | | | | |
| | V913R/S932A | | | | |
| 437/438 | L24W/L28S/L29T/P39Q/Q50V/ | Q135A | + | + | ++ |
| | A62L/P78E/D87E/S135A/T150S/ | | | | |
| | T266N/R267K/A437G/T486E/E522V/ | | | | |
| | L569T/L670T/T692G/A711H/ | | | | |
| | L736M/A750P/A812E/Q830K/ | | | | |
| | G842S/L871E/R883H/Q894G/ | | | | |
| | V913R/S932A | | | | |
| 439/440 | L24W/L28S/L29T/P39I/Q50V/A62L/ | Q39I | | + | |
| | P78E/D87E/S135Q/T150S/T266N/ | | | | |
| | R267K/A437G/T486E/E522V/ | | | | |
| | L569T/L670T/T692G/A711H/ | | | | |
| | L736M/A750P/A812E/Q830K/ | | | | |
| | G842S/L871E/R883H/Q894G/ | | | | |
| | V913R/S932A | | | | |
| 441/442 | L24W/L28S/L29T/P39Q/Q50V/ | E87N | | + | ++ |
| | A62L/P78E/D87N/S135Q/T150S/ | | | | |
| | T266N/R267K/A437G/T486E/E522V/ | | | | |
| | L569T/L670T/T692G/A711H/ | | | | |
| | L736M/A750P/A812E/Q830K/ | | | | |
| | G842S/L871E/R883H/Q894G/ | | | | |
| | V913R/S932A | | | | |
| 443/444 | L24W/L28S/L29T/P39Q/Q50V/ | E87M | + | + | ++ |
| | A62L/P78E/D87M/S135Q/T150S/ | | | | |
| | T266N/R267K/A437G/T486E/E522V/ | | | | |
| | L569T/L670T/T692G/A711H/ | | | | |
| | L736M/A750P/A812E/Q830K/ | | | | |
| | G842S/L871E/R883H/Q894G/ | | | | |
| | V913R/S932A | | | | |
| 445/446 | L24W/L28S/L29T/P39Q/Q50V/ | Q135C | + | + | |
| | A62L/P78E/D87E/S135C/T150S/ | | | | |
| | T266N/R267K/A437G/T486E/E522V/ | | | | |
| | L569T/L670T/T692G/A711H/ | | | | |
| | L736M/A750P/A812E/Q830K/ | | | | |
| | G842S/L871E/R883H/Q894G/ | | | | |
| | V913R/S932A | | | | |
| 447/448 | L24W/L28S/L29T/P39Q/Q50V/ | A932L | | | + |
| | A62L/P78E/D87E/S135Q/T150S/ | | | | |
| | T266N/R267K/A437G/T486E/E522V/ | | | | |
| | L569T/L670T/T692G/A711H/ | | | | |
| | L736M/A750P/A812E/Q830K/ | | | | |
| | G842S/L871E/R883H/Q894G/ | | | | |
| | V913R/S932L | | | | |
| 449/450 | L24W/L28S/L29T/P39Q/Q50V/ | T670G | + | + | |
| | A62L/P78E/D87E/S135Q/T150S/ | | | | |
| | T266N/R267K/A437G/T486E/E522V/ | | | | |
| | L569T/L670G/T692G/A711H/ | | | | |
| | L736M/A750P/A812E/Q830K/ | | | | |
| | G842S/L871E/R883H/Q894G/ | | | | |
| | V913R/S932A | | | | |
| 451/452 | L24W/L28S/L29T/P39Q/Q50V/ | K830F | + | + | |
| | A62L/P78E/D87E/S135Q/T150S/ | | | | |
| | T266N/R267K/A437G/T486E/E522V/ | | | | |
| | L569T/L670T/T692G/A711H/ | | | | |
| | L736M/A750P/A812E/Q830F/ | | | | |
| | G842S/L871E/R883H/Q894G/ | | | | |
| | V913R/S932A | | | | |
| 453/454 | L24W/L28S/L29T/P39Q/Q50V/ | V522H | + | | |
| | A62L/P78E/D87E/S135Q/T150S/ | | | | |
| | T266N/R267K/A437G/T486E/E522H/ | | | | |
| | L569T/L670T/T692G/A711H/ | | | | |
| | L736M/A750P/A812E/Q830K/ | | | | |
| | G842S/L871E/R883H/Q894G/ | | | | |
| | V913R/S932A | | | | |
| 455/456 | L24W/L28D/L29T/P39Q/Q50V/ | S28D | + | + | |
| | A62L/P78E/D87E/S135Q/T150S/ | | | | |
| | T266N/R267K/A437G/T486E/E522V/ | | | | |
| | L569T/L670T/T692G/A711H/ | | | | |
| | L736M/A750P/A812E/Q830K/ | | | | |
| | G842S/L871E/R883H/Q894G/ | | | | |
| | V913R/S932A | | | | |
| 457/458 | L24W/L28S/L29T/P39Q/Q50V/ | V522Q | ++ | ++ | + |
| | A62L/P78E/D87E/S135Q/T150S/ | | | | |
| | T266N/R267K/A437G/T486E/E522Q/ | | | | |
| | L569T/L670T/T692G/A711H/ | | | | |
| | L736M/A750P/A812E/Q830K/ | | | | |
| | G842S/L871E/R883H/Q894G/ | | | | |
| | V913R/S932A | | | | |
| 459/460 | L24W/L28S/L29T/P39Q/Q50A/ | V50A | + | + | |
| | A62L/P78E/D87E/S135Q/T150S/ | | | | |
| | T266N/R267K/A437G/T486E/E522V/ | | | | |
| | L569T/L670T/T692G/A711H/ | | | | |
| | L736M/A750P/A812E/Q830K/ | | | | |
| | G842S/L871E/R883H/Q894G/ | | | | |
| | V913R/S932A | | | | |
| 461/462 | L24W/L28S/L29T/P39Q/Q50V/ | T670S | ++ | ++ | + |
| | A62L/P78E/D87E/S135Q/T150S/ | | | | |
| | T266N/R267K/A437G/T486E/E522V/ | | | | |
| | L569T/L670S/T692G/A711H/ | | | | |
| | L736M/A750P/A812E/Q830K/ | | | | |
| | G842S/L871E/R883H/Q894G/ | | | | |
| | V913R/S932A | | | | |
| 463/464 | L24W/L28S/L29T/P39Q/Q50V/ | K830M | + | ++ | |
| | A62L/P78E/D87E/S135Q/T150S/ | | | | |
| | T266N/R267K/A437G/T486E/E522V/ | | | | |
| | L569T/L670T/T692G/A711H/ | | | | |
| | L736M/A750P/A812E/Q830M/ | | | | |
| | G842S/L871E/R883H/Q894G/ | | | | |
| | V913R/S932A | | | | |
| 465/466 | L24W/L28S/L29T/P39Q/Q50V/ | S842A | + | + | |
| | A62L/P78E/D87E/S135Q/T150S/ | | | | |
| | T266N/R267K/A437G/T486E/E522V/ | | | | |
| | L569T/L670T/T692G/A711H/ | | | | |
| | L736M/A750P/A812E/Q830K/ | | | | |
| | G842A/L871E/R883H/Q894G/ | | | | |
| | V913R/S932A | | | | |
| 467/468 | L24W/L28S/L29T/P39Q/Q50V/ | E87T | | + | ++ |
| | A62L/P78E/D87T/S135Q/T150S/ | | | | |
| | T266N/R267K/A437G/T486E/E522V/ | | | | |
| | L569T/L670T/T692G/A711H/ | | | | |
| | L736M/A750P/A812E/Q830K/ | | | | |
| | G842S/L871E/R883H/Q894G/ | | | | |
| | V913R/S932A | | | | |
| 469/470 | L24W/L28S/L29T/P39Q/Q50V/ | V522T | + | + | |
| | A62L/P78E/D87E/S135Q/T150S/ | | | | |
| | T266N/R267K/A437G/T486E/E522T/ | | | | |
| | L569T/L670T/T692G/A711H/ | | | | |
| | L736M/A750P/A812E/Q830K/ | | | | |
| | G842S/L871E/R883H/Q894G/ | | | | |
| | V913R/S932A | | | | |
| 471/472 | L24K/L28S/L29T/P39Q/Q50V/A62L/ | W24K | +++ | +++ | ++ |
| | P78E/D87E/S135Q/T150S/T266N/ | | | | |
| | R267K/A437G/T486E/E522V/ | | | | |
| | L569T/L670T/T692G/A711H/ | | | | |
| | L736M/A750P/A812E/Q830K/ | | | | |
| | G842S/L871E/R883H/Q894G/ | | | | |
| | V913R/S932A | | | | |
| 473/474 | L24W/L28S/L29T/P39Q/Q50V/ | E871K | + | + | + |
| | A62L/P78E/D87E/S135Q/T150S/ | | | | |
| | T266N/R267K/A437G/T486E/E522V/ | | | | |
| | L569T/L670T/T692G/A711H/ | | | | |
| | L736M/A750P/A812E/Q830K/ | | | | |
| | G842S/L871K/R883H/Q894G/ | | | | |
| | V913R/S932A | | | | |
| 475/476 | L24W/L28S/L29T/P39Q/Q50V/ | P750E | + | + | |
| | A62L/P78E/D87E/S135Q/T150S/ | | | | |
| | T266N/R267K/A437G/T486E/E522V/ | | | | |
| | L569T/L670T/T692G/A711H/ | | | | |
| | L736M/A750E/A812E/Q830K/ | | | | |
| | G842S/L871E/R883H/Q894G/ | | | | |
| | V913R/S932A | | | | |
| 477/478 | L24W/L28S/L29T/P39Q/Q50V/ | K830T | + | + | |
| | A62L/P78E/D87E/S135Q/T150S/ | | | | |
| | T266N/R267K/A437G/T486E/E522V/ | | | | |
| | L569T/L670T/T692G/A711H/ | | | | |
| | L736M/A750P/A812E/Q830T/ | | | | |
| | G842S/L871E/R883H/Q894G/ | | | | |
| | V913R/S932A | | | | |
| 479/480 | L24W/L28S/L29T/P39Q/Q50I/A62L/ | V50I | ++ | ++ | + |
| | P78E/D87E/S135Q/T150S/T266N/ | | | | |
| | R267K/A437G/T486E/E522V/ | | | | |
| | L569T/L670T/T692G/A711H/ | | | | |
| | L736M/A750P/A812E/Q830K/ | | | | |
| | G842S/L871E/R883H/Q894G/ | | | | |
| | V913R/S932A | | | | |
| 481/482 | L24W/L28S/L29T/P39Q/Q50V/ | A932E | ++ | + | ++ |
| | A62L/P78E/D87E/S135Q/T150S/ | | | | |
| | T266N/R267K/A437G/T486E/E522V/ | | | | |
| | L569T/L670T/T692G/A711H/ | | | | |
| | L736M/A750P/A812E/Q830K/ | | | | |
| | G842S/L871E/R883H/Q894G/ | | | | |
| | V913R/S932E | | | | |
| 483/484 | L24W/L28S/L29T/P39Q/Q50V/ | N266Q | + | + | |
| | A62L/P78E/D87E/S135Q/T150S/ | | | | |
| | T266Q/R267K/A437G/T486E/E522V/ | | | | |
| | L569T/L670T/T692G/A711H/ | | | | |
| | L736M/A750P/A812E/Q830K/ | | | | |
| | G842S/L871E/R883H/Q894G/ | | | | |
| | V913R/S932A | | | | |
| 485/486 | L24W/L28S/L29T/P39A/Q50V/ | Q39A | | | + |
| | A62L/P78E/D87E/S135Q/T150S/ | | | | |
| | T266N/R267K/A437G/T486E/E522V/ | | | | |
| | L569T/L670T/T692G/A711H/ | | | | |
| | L736M/A750P/A812E/Q830K/ | | | | |
| | G842S/L871E/R883H/Q894G/ | | | | |
| | V913R/S932A | | | | |
| 487/488 | L24T/L28S/L29T/P39Q/Q50V/A62L/ | W24T | +++ | +++ | ++ |
| | P78E/D87E/S135Q/T150S/T266N/ | | | | |
| | R267K/A437G/T486E/E522V/ | | | | |
| | L569T/L670T/T692G/A711H/ | | | | |
| | L736M/A750P/A812E/Q830K/ | | | | |
| | G842S/L871E/R883H/Q894G/ | | | | |
| | V913R/S932A | | | | |
| 489/490 | L24W/L28S/L29T/P39Q/Q50V/ | E871T | + | + | |
| | A62L/P78E/D87E/S135Q/T150S/ | | | | |
| | T266N/R267K/A437G/T486E/E522V/ | | | | |
| | L569T/L670T/T692G/A711H/ | | | | |
| | L736M/A750P/A812E/Q830K/ | | | | |
| | G842S/L871T/R883H/Q894G/ | | | | |
| | V913R/S932A | | | | |
| 491/492 | L24W/L28S/L29T/P39Q/Q50V/ | S842M | + | | + |
| | A62L/P78E/D87E/S135Q/T150S/ | | | | |
| | T266N/R267K/A437G/T486E/E522V/ | | | | |
| | L569T/L670T/T692G/A711H/ | | | | |
| | L736M/A750P/A812E/Q830K/ | | | | |
| | G842M/L871E/R883H/Q894G/ | | | | |
| | V913R/S932A | | | | |
| 493/494 | L24W/L28S/L29T/P39Q/Q50V/ | H711T | + | ++ | + |
| | A62L/P78E/D87E/S135Q/T150S/ | | | | |
| | T266N/R267K/A437G/T486E/E522V/ | | | | |
| | L569T/L670T/T692G/A711T/ | | | | |
| | L736M/A750P/A812E/Q830K/ | | | | |
| | G842S/L871E/R883H/Q894G/ | | | | |
| | V913R/S932A | | | | |
| 495/496 | L24W/L28S/L29T/P39Q/Q50V/ | N266K | + | | |
| | A62L/P78E/D87E/S135Q/T150S/ | | | | |
| | T266K/R267K/A437G/T486E/E522V/ | | | | |
| | L569T/L670T/T692G/A711H/ | | | | |
| | L736M/A750P/A812E/Q830K/ | | | | |
| | G842S/L871E/R883H/Q894G/ | | | | |
| | V913R/S932A | | | | |
| 497/498 | L24W/L28S/L29T/P39Q/Q50V/ | E486F | + | + | + |
| | A62L/P78E/D87E/S135Q/T150S/ | | | | |
| | T266N/R267K/A437G/T486F/E522V/ | | | | |
| | L569T/L670T/T692G/A711H/ | | | | |
| | L736M/A750P/A812E/Q830K/ | | | | |
| | G842S/L871E/R883H/Q894G/ | | | | |
| | V913R/S932A | | | | |
| 499/500 | L24W/L28S/L29T/P39Q/Q50M/ | V50M | + | + | |
| | A62L/P78E/D87E/S135Q/T150S/ | | | | |
| | T266N/R267K/A437G/T486E/E522V/ | | | | |
| | L569T/L670T/T692G/A711H/ | | | | |
| | L736M/A750P/A812E/Q830K/ | | | | |
| | G842S/L871E/R883H/Q894G/ | | | | |
| | V913R/S932A | | | | |
| 501/502 | L24W/L28S/L29T/P39Q/Q50V/ | E486Y | + | + | ++ |
| | A62L/P78E/D87E/S135Q/T150S/ | | | | |
| | T266N/R267K/A437G/T486Y/E522V/ | | | | |
| | L569T/L670T/T692G/A711H/ | | | | |
| | L736M/A750P/A812E/Q830K/ | | | | |
| | G842S/L871E/R883H/Q894G/ | | | | |
| | V913R/S932A | | | | |
| 503/504 | L24W/L28S/L29T/P39Q/Q50V/ | T670R | + | + | ++ |
| | A62L/P78E/D87E/S135Q/T150S/ | | | | |
| | T266N/R267K/A437G/T486E/E522V/ | | | | |
| | L569T/L670R/T692G/A711H/ | | | | |
| | L736M/A750P/A812E/Q830K/ | | | | |
| | G842S/L871E/R883H/Q894G/ | | | | |
| | V913R/S932A | | | | |
| 505/506 | L24M/L28S/L29T/P39Q/Q50V/A62L/ | W24M | +++ | +++ | ++ |
| | P78E/D87E/S135Q/T150S/T266N/ | | | | |
| | R267K/A437G/T486E/E522V/ | | | | |
| | L569T/L670T/T692G/A711H/ | | | | |
| | L736M/A750P/A812E/Q830K/ | | | | |
| | G842S/L871E/R883H/Q894G/ | | | | |
| | V913R/S932A | | | | |
| 507/508 | L24W/L28S/L29T/P39Q/Q50V/ | L62F | + | + | + |
| | A62F/P78E/D87E/S135Q/T150S/ | | | | |
| | T266N/R267K/A437G/T486E/E522V/ | | | | |
| | L569T/L670T/T692G/A711H/ | | | | |
| | L736M/A750P/A812E/Q830K/ | | | | |
| | G842S/L871E/R883H/Q894G/ | | | | |
| | V913R/S932A | | | | |
| 509/510 | L24W/L28S/L29T/P39Q/Q50V/ | T569Y | + | + | |
| | A62L/P78E/D87E/S135Q/T150S/ | | | | |
| | T266N/R267K/A437G/T486E/E522V/ | | | | |
| | L569Y/L670T/T692G/A711H/ | | | | |
| | L736M/A750P/A812E/Q830K/ | | | | |
| | G842S/L871E/R883H/Q894G/ | | | | |
| | V913R/S932A | | | | |
| 511/512 | L24W/L28S/L29T/P39Q/Q50V/ | H711Q | | ++ | |
| | A62L/P78E/D87E/S135Q/T150S/ | | | | |
| | T266N/R267K/A437G/T486E/E522V/ | | | | |
| | L569T/L670T/T692G/A711Q/ | | | | |
| | L736M/A750P/A812E/Q830K/ | | | | |
| | G842S/L871E/R883H/Q894G/ | | | | |
| | V913R/S932A | | | | |
| 513/514 | L24W/L28S/L29T/P39Q/Q50V/ | E486I | + | + | + |
| | A62L/P78E/D87E/S135Q/T150S/ | | | | |
| | T266N/R267K/A437G/T486I/E522V/ | | | | |
| | L569T/L670T/T692G/A711H/ | | | | |
| | L736M/A750P/A812E/Q830K/ | | | | |
| | G842S/L871E/R883H/Q894G/ | | | | |
| | V913R/S932A | | | | |
| 515/516 | L24W/L28S/L29T/P39Q/Q50V/ | Q135H | + | + | + |
| | A62L/P78E/D87E/S135H/T150S/ | | | | |
| | T266N/R267K/A437G/T486E/E522V/ | | | | |
| | L569T/L670T/T692G/A711H/ | | | | |
| | L736M/A750P/A812E/Q830K/ | | | | |
| | G842S/L871E/R883H/Q894G/ | | | | |
| | V913R/S932A | | | | |
| 517/518 | L24W/L28S/L29T/P39Q/Q50V/ | T670H | + | + | |
| | A62L/P78E/D87E/S135Q/T150S/ | | | | |
| | T266N/R267K/A437G/T486E/E522V/ | | | | |
| | L569T/L670H/T692G/A711H/ | | | | |
| | L736M/A750P/A812E/Q830K/ | | | | |
| | G842S/L871E/R883H/Q894G/ | | | | |
| | V913R/S932A | | | | |
| 519/520 | L24W/L28S/L29T/P39Q/Q50V/ | V522N | + | | |
| | A62L/P78E/D87E/S135Q/T150S/ | | | | |
| | T266N/R267K/A437G/T486E/E522N/ | | | | |
| | L569T/L670T/T692G/A711H/ | | | | |
| | L736M/A750P/A812E/Q830K/ | | | | |
| | G842S/L871E/R883H/Q894G/ | | | | |
| | V913R/S932A | | | | |
| 521/522 | L24W/L28S/L29T/P39Q/Q50V/ | G894E | + | + | |
| | A62L/P78E/D87E/S135Q/T150S/ | | | | |
| | T266N/R267K/A437G/T486E/E522V/ | | | | |
| | L569T/L670T/T692G/A711H/ | | | | |
| | L736M/A750P/A812E/Q830K/ | | | | |
| | G842S/L871E/R883H/Q894E/ | | | | |
| | V913R/S932A | | | | |
| 523/524 | L24W/L28S/L29T/P39Q/Q50V/ | E871Q | + | ++ | ++ |
| | A62L/P78E/D87E/S135Q/T150S/ | | | | |
| | T266N/R267K/A437G/T486E/E522V/ | | | | |
| | L569T/L670T/T692G/A711H/ | | | | |
| | L736M/A750P/A812E/Q830K/ | | | | |
| | G842S/L871Q/R883H/Q894G/ | | | | |
| | V913R/S932A | | | | |
| 525/526 | L24W/L28E/L29T/P39Q/Q50V/ | S28E | + | + | |
| | A62L/P78E/D87E/S135Q/T150S/ | | | | |
| | T266N/R267K/A437G/T486E/E522V/ | | | | |
| | L569T/L670T/T692G/A711H/ | | | | |
| | L736M/A750P/A812E/Q830K/ | | | | |
| | G842S/L871E/R883H/Q894G/ | | | | |
| | V913R/S932A | | | | |
| 527/528 | L24W/L28S/L29T/P39Q/Q50V/ | S842N | + | | |
| | A62L/P78E/D87E/S135Q/T150S/ | | | | |
| | T266N/R267K/A437G/T486E/E522V/ | | | | |
| | L569T/L670T/T692G/A711H/ | | | | |
| | L736M/A750P/A812E/Q830K/ | | | | |
| | G842N/L871E/R883H/Q894G/ | | | | |
| | V913R/S932A | | | | |
| 529/530 | L24W/L28S/L29T/P39Q/Q50V/ | E78H | + | + | ++ |
| | A62L/P78H/D87E/S135Q/T150S/ | | | | |
| | T266N/R267K/A437G/T486E/E522V/ | | | | |
| | L569T/L670T/T692G/A711H/ | | | | |
| | L736M/A750P/A812E/Q830K/ | | | | |
| | G842S/L871E/R883H/Q894G/ | | | | |
| | V913R/S932A | | | | |
| 531/532 | L24W/L28S/L29T/P39Q/Q50V/ | S150T | + | + | + |
| | A62L/P78E/D87E/S135Q/T266N/ | | | | |
| | R267K/A437G/T486E/E522V/L569T/ | | | | |
| | L670T/T692G/A711H/L736M/ | | | | |
| | A750P/A812E/Q830K/G842S/ | | | | |
| | L871E/R883H/Q894G/V913R/ | | | | |
| | S932A | | | | |
| 533/534 | L24W/L28S/L29T/P39Q/Q50V/ | K830Q | + | + | |
| | A62L/P78E/D87E/S135Q/T150S/ | | | | |
| | T266N/R267K/A437G/T486E/E522V/ | | | | |
| | L569T/L670T/T692G/A711H/ | | | | |
| | L736M/A750P/A812E/G842S/ | | | | |
| | L871E/R883H/Q894G/V913R/S932A | | | | |
| 535/536 | L24W/L28S/L29T/P39Q/Q50V/ | R913I | + | | |
| | A62L/P78E/D87E/S135Q/T150S/ | | | | |
| | T266N/R267K/A437G/T486E/E522V/ | | | | |
| | L569T/L670T/T692G/A711H/ | | | | |
| | L736M/A750P/A812E/Q830K/ | | | | |
| | G842S/L871E/R883H/Q894G/ | | | | |
| | V913I/S932A | | | | |
| 537/538 | L24W/L28S/L29T/P39Q/Q50V/ | R913H | + | + | |
| | A62L/P78E/D87E/S135Q/T150S/ | | | | |
| | T266N/R267K/A437G/T486E/E522V/ | | | | |
| | L569T/L670T/T692G/A711H/ | | | | |
| | L736M/A750P/A812E/Q830K/ | | | | |
| | G842S/L871E/R883H/Q894G/ | | | | |
| | V913H/S932A | | | | |
| 539/540 | L24W/L28S/L29T/P39Q/Q50V/ | E871Y | + | ++ | + |
| | A62L/P78E/D87E/S135Q/T150S/ | | | | |
| | T266N/R267K/A437G/T486E/E522V/ | | | | |
| | L569T/L670T/T692G/A711H/ | | | | |
| | L736M/A750P/A812E/Q830K/ | | | | |
| | G842S/L871Y/R883H/Q894G/ | | | | |
| | V913R/S932A | | | | |
| 541/542 | L24W/L28S/L29N/P39Q/Q50V/ | T29N | + | + | |
| | A62L/P78E/D87E/S135Q/T150S/ | | | | |
| | T266N/R267K/A437G/T486E/E522V/ | | | | |
| | L569T/L670T/T692G/A711H/ | | | | |
| | L736M/A750P/A812E/Q830K/ | | | | |
| | G842S/L871E/R883H/Q894G/ | | | | |
| | V913R/S932A | | | | |
| 543/544 | L24W/L28S/L29T/P39Q/Q50V/ | T670K | + | + | + |
| | A62L/P78E/D87E/S135Q/T150S/ | | | | |
| | T266N/R267K/A437G/T486E/E522V/ | | | | |
| | L569T/L670K/T692G/A711H/ | | | | |
| | L736M/A750P/A812E/Q830K/ | | | | |
| | G842S/L871E/R883H/Q894G/ | | | | |
| | V913R/S932A | | | | |
| 545/546 | L24W/L28S/L29T/P39Q/Q50V/ | G692A | + | + | + |
| | A62L/P78E/D87E/S135Q/T150S/ | | | | |
| | T266N/R267K/A437G/T486E/E522V/ | | | | |
| | L569T/L670T/T692A/A711H/ | | | | |
| | L736M/A750P/A812E/Q830K/ | | | | |
| | G842S/L871E/R883H/Q894G/ | | | | |
| | V913R/S932A | | | | |
| 547/548 | L24W/L28S/L29T/P39Q/Q50T/A62L/ | V50T | + | + | |
| | P78E/D87E/S135Q/T150S/T266N/ | | | | |
| | R267K/A437G/T486E/E522V/ | | | | |
| | L569T/L670T/T692G/A711H/ | | | | |
| | L736M/A750P/A812E/Q830K/ | | | | |
| | G842S/L871E/R883H/Q894G/ | | | | |
| | V913R/S932A | | | | |
| 549/550 | L24W/L28S/L29T/P39Q/Q50V/ | S842H | + | | |
| | A62L/P78E/D87E/S135Q/T150S/ | | | | |
| | T266N/R267K/A437G/T486E/E522V/ | | | | |
| | L569T/L670T/T692G/A711H/ | | | | |
| | L736M/A750P/A812E/Q830K/ | | | | |
| | G842H/L871E/R883H/Q894G/ | | | | |
| | V913R/S932A | | | | |
| 551/552 | L24W/L28S/L29T/P39Q/Q50V/ | G692M | + | + | |
| | A62L/P78E/D87E/S135Q/T150S/ | | | | |
| | T266N/R267K/A437G/T486E/E522V/ | | | | |
| | L569T/L670T/T692M/A711H/ | | | | |
| | L736M/A750P/A812E/Q830K/ | | | | |
| | G842S/L871E/R883H/Q894G/ | | | | |
| | V913R/S932A | | | | |
| 553/554 | L24W/L28S/L29Q/P39Q/Q50V/ | T29Q | ++ | + | |
| | A62L/P78E/D87E/S135Q/T150S/ | | | | |
| | T266N/R267K/A437G/T486E/E522V/ | | | | |
| | L569T/L670T/T692G/A711H/ | | | | |
| | L736M/A750P/A812E/Q830K/ | | | | |
| | G842S/L871E/R883H/Q894G/ | | | | |
| | V913R/S932A | | | | |
| 555/556 | L24W/L28S/L29T/P39Q/Q50V/ | G894D | + | + | + |
| | A62L/P78E/D87E/S135Q/T150S/ | | | | |
| | T266N/R267K/A437G/T486E/E522V/ | | | | |
| | L569T/L670T/T692G/A711H/ | | | | |
| | L736M/A750P/A812E/Q830K/ | | | | |
| | G842S/L871E/R883H/Q894D/ | | | | |
| | V913R/S932A | | | | |
| 557/558 | L24W/L28S/L29T/P39Q/Q50V/ | R913F | + | + | + |
| | A62L/P78E/D87E/S135Q/T150S/ | | | | |
| | T266N/R267K/A437G/T486E/E522V/ | | | | |
| | L569T/L670T/T692G/A711H/ | | | | |
| | L736M/A750P/A812E/Q830K/ | | | | |
| | G842S/L871E/R883H/Q894G/ | | | | |
| | V913F/S932A | | | | |
| 559/560 | L24W/L28S/L29T/P39Q/Q50V/ | T670D | ++ | ++ | |
| | A62L/P78E/D87E/S135Q/T150S/ | | | | |
| | T266N/R267K/A437G/T486E/E522V/ | | | | |
| | L569T/L670D/T692G/A711H/ | | | | |
| | L736M/A750P/A812E/Q830K/ | | | | |
| | G842S/L871E/R883H/Q894G/ | | | | |
| | V913R/S932A | | | | |
| 561/562 | L24W/L28S/L29T/P39Q/Q50V/ | L62M | + | + | ++ |
| | A62M/P78E/D87E/S135Q/T150S/ | | | | |
| | T266N/R267K/A437G/T486E/E522V/ | | | | |
| | L569T/L670T/T692G/A711H/ | | | | |
| | L736M/A750P/A812E/Q830K/ | | | | |
| | G842S/L871E/R883H/Q894G/ | | | | |
| | V913R/S932A | | | | |
| 563/564 | L24W/L28S/L29T/P39Q/Q50V/ | E486C | | | + |
| | A62L/P78E/D87E/S135Q/T150S/ | | | | |
| | T266N/R267K/A437G/T486C/E522V/ | | | | |
| | L569T/L670T/T692G/A711H/ | | | | |
| | L736M/A750P/A812E/Q830K/ | | | | |
| | G842S/L871E/R883H/Q894G/ | | | | |
| | V913R/S932A | | | | |
| 565/566 | L24W/L28S/L29T/P39Q/Q50V/ | E78T | | + | + |
| | A62L/P78T/D87E/S135Q/T150S/ | | | | |
| | T266N/R267K/A437G/T486E/E522V/ | | | | |
| | L569T/L670T/T692G/A711H/ | | | | |
| | L736M/A750P/A812E/Q830K/ | | | | |
| | G842S/L871E/R883H/Q894G/ | | | | |
| | V913R/S932A | | | | |
| 567/568 | L24W/L28S/L29T/P39Q/Q50V/ | E812A | + | + | ++ |
| | A62L/P78E/D87E/S135Q/T150S/ | | | | |
| | T266N/R267K/A437G/T486E/E522V/ | | | | |
| | L569T/L670T/T692G/A711H/ | | | | |
| | L736M/A750P/Q830K/G842S/ | | | | |
| | L871E/R883H/Q894G/V913R/S932A | | | | |
| 569/570 | L24W/L28S/L29T/P39Q/Q50V/ | K267H | | + | |
| | A62L/P78E/D87E/S135Q/T150S/ | | | | |
| | T266N/R267H/A437G/T486E/E522V/ | | | | |
| | L569T/L670T/T692G/A711H/ | | | | |
| | L736M/A750P/A812E/Q830K/ | | | | |
| | G842S/L871E/R883H/Q894G/ | | | | |
| | V913R/S932A | | | | |
| 571/572 | L24W/L28S/L29I/P39Q/Q50V/A62L/ | T29I | + | | |
| | P78E/D87E/S135Q/T150S/T266N/ | | | | |
| | R267K/A437G/T486E/E522V/ | | | | |
| | L569T/L670T/T692G/A711H/ | | | | |
| | L736M/A750P/A812E/Q830K/ | | | | |
| | G842S/L871E/R883H/Q894G/ | | | | |
| | V913R/S932A | | | | |
| 573/574 | L24H/L28S/L29T/P39Q/Q50V/A62L/ | W24H | ++ | + | |
| | P78E/D87E/S135Q/T150S/T266N/ | | | | |
| | R267K/A437G/T486E/E522V/ | | | | |
| | L569T/L670T/T692G/A711H/ | | | | |
| | L736M/A750P/A812E/Q830K/ | | | | |
| | G842S/L871E/R883H/Q894G/ | | | | |
| | V913R/S932A | | | | |
| 575/576 | L24W/L28S/L29T/P39Q/Q50V/ | Q135I | + | + | ++ |
| | A62L/P78E/D87E/S135I/T150S/ | | | | |
| | T266N/R267K/A437G/T486E/E522V/ | | | | |
| | L569T/L670T/T692G/A711H/ | | | | |
| | L736M/A750P/A812E/Q830K/ | | | | |
| | G842S/L871E/R883H/Q894G/ | | | | |
| | V913R/S932A | | | | |
| 577/578 | L24W/L28S/L29T/P39Q/Q50V/ | G692H | + | + | ++ |
| | A62L/P78E/D87E/S135Q/T150S/ | | | | |
| | T266N/R267K/A437G/T486E/E522V/ | | | | |
| | L569T/L670T/T692H/A711H/ | | | | |
| | L736M/A750P/A812E/Q830K/ | | | | |
| | G842S/L871E/R883H/Q894G/ | | | | |
| | V913R/S932A | | | | |
| 579/580 | L24W/L28H/L29T/P39Q/Q50V/ | S28H | + | + | |
| | A62L/P78E/D87E/S135Q/T150S/ | | | | |
| | T266N/R267K/A437G/T486E/E522V/ | | | | |
| | L569T/L670T/T692G/A711H/ | | | | |
| | L736M/A750P/A812E/Q830K/ | | | | |
| | G842S/L871E/R883H/Q894G/ | | | | |
| | V913R/S932A | | | | |
| 581/582 | L24W/L28S/L29T/P39Q/Q50V/ | R913N | + | + | |
| | A62L/P78E/D87E/S135Q/T150S/ | | | | |
| | T266N/R267K/A437G/T486E/E522V/ | | | | |
| | L569T/L670T/T692G/A711H/ | | | | |
| | L736M/A750P/A812E/Q830K/ | | | | |
| | G842S/L871E/R883H/Q894G/ | | | | |
| | V913N/S932A | | | | |
| 583/584 | L24W/L28S/L29T/P39Q/Q50V/ | S842D | + | + | |
| | A62L/P78E/D87E/S135Q/T150S/ | | | | |
| | T266N/R267K/A437G/T486E/E522V/ | | | | |
| | L569T/L670T/T692G/A711H/ | | | | |
| | L736M/A750P/A812E/Q830K/ | | | | |
| | G842D/L871E/R883H/Q894G/ | | | | |
| | V913R/S932A | | | | |
| 585/586 | L24W/L28S/L29T/P39Q/Q50V/ | V522K | + | | |
| | A62L/P78E/D87E/S135Q/T150S/ | | | | |
| | T266N/R267K/A437G/T486E/E522K/ | | | | |
| | L569T/L670T/T692G/A711H/ | | | | |
| | L736M/A750P/A812E/Q830K/ | | | | |
| | G842S/L871E/R883H/Q894G/ | | | | |
| | V913R/S932A | | | | |
| 587/588 | L24W/L28S/L29T/P39Q/Q50V/ | G894H | + | ++ | |
| | A62L/P78E/D87E/S135Q/T150S/ | | | | |
| | T266N/R267K/A437G/T486E/E522V/ | | | | |
| | L569T/L670T/T692G/A711H/ | | | | |
| | L736M/A750P/A812E/Q830K/ | | | | |
| | G842S/L871E/R883H/Q894H/ | | | | |
| | V913R/S932A | | | | |
| 589/590 | L24W/L28S/L29T/P39Q/Q50V/ | E78K | + | + | ++ |
| | A62L/P78K/D87E/S135Q/T150S/ | | | | |
| | T266N/R267K/A437G/T486E/E522V/ | | | | |
| | L569T/L670T/T692G/A711H/ | | | | |
| | L736M/A750P/A812E/Q830K/ | | | | |
| | G842S/L871E/R883H/Q894G/ | | | | |
| | V913R/S932A | | | | |
| 591/592 | L24W/L28S/L29T/P39F/Q50V/A62L/ | Q39F | + | + | |
| | P78E/D87E/S135Q/T150S/T266N/ | | | | |
| | R267K/A437G/T486E/E522V/ | | | | |
| | L569T/L670T/T692G/A711H/ | | | | |
| | L736M/A750P/A812E/Q830K/ | | | | |
| | G842S/L871E/R883H/Q894G/ | | | | |
| | V913R/S932A | | | | |
| 593/594 | L24W/L28S/L29T/P39Q/Q50V/ | E871W | + | ++ | ++ |
| | A62L/P78E/D87E/S135Q/T150S/ | | | | |
| | T266N/R267K/A437G/T486E/E522V/ | | | | |
| | L569T/L670T/T692G/A711H/ | | | | |
| | L736M/A750P/A812E/Q830K/ | | | | |
| | G842S/L871W/R883H/Q894G/ | | | | |
| | V913R/S932A | | | | |
| 595/596 | L24W/L28S/L29T/P39Q/Q50V/ | Q135Y | | | + |
| | A62L/P78E/D87E/S135Y/T150S/ | | | | |
| | T266N/R267K/A437G/T486E/E522V/ | | | | |
| | L569T/L670T/T692G/A711H/ | | | | |
| | L736M/A750P/A812E/Q830K/ | | | | |
| | G842S/L871E/R883H/Q894G/ | | | | |
| | V913R/S932A | | | | |
| 597/598 | L24W/L28S/L29T/P39Q/Q50V/ | S842Q | + | | |
| | A62L/P78E/D87E/S135Q/T150S/ | | | | |
| | T266N/R267K/A437G/T486E/E522V/ | | | | |
| | L569T/L670T/T692G/A711H/ | | | | |
| | L736M/A750P/A812E/Q830K/ | | | | |
| | G842Q/L871E/R883H/Q894G/ | | | | |
| | V913R/S932A | | | | |
| 599/600 | L24W/L28S/L29H/P39Q/Q50V/ | T29H | + | | + |
| | A62L/P78E/D87E/S135Q/T150S/ | | | | |
| | T266N/R267K/A437G/T486E/E522V/ | | | | |
| | L569T/L670T/T692G/A711H/ | | | | |
| | L736M/A750P/A812E/Q830K/ | | | | |
| | G842S/L871E/R883H/Q894G/ | | | | |
| | V913R/S932A | | | | |
| 601/602 | L24W/L28S/L29T/P39Q/Q50V/ | E78Q | + | + | ++ |
| | A62L/P78Q/D87E/S135Q/T150S/ | | | | |
| | T266N/R267K/A437G/T486E/E522V/ | | | | |
| | L569T/L670T/T692G/A711H/ | | | | |
| | L736M/A750P/A812E/Q830K/ | | | | |
| | G842S/L871E/R883H/Q894G/ | | | | |
| | V913R/S932A | | | | |
| 603/604 | L24W/L28S/L29T/P39Q/Q50V/ | V522D | + | | |
| | A62L/P78E/D87E/S135Q/T150S/ | | | | |
| | T266N/R267K/A437G/T486E/E522D/ | | | | |
| | L569T/L670T/T692G/A711H/ | | | | |
| | L736M/A750P/A812E/Q830K/ | | | | |
| | G842S/L871E/R883H/Q894G/ | | | | |
| | V913R/S932A | | | | |
| 605/606 | L24W/L28S/L29T/P39Q/Q50V/ | A932Y | + | + | +++ |
| | A62L/P78E/D87E/S135Q/T150S/ | | | | |
| | T266N/R267K/A437G/T486E/E522V/ | | | | |
| | L569T/L670T/T692G/A711H/ | | | | |
| | L736M/A750P/A812E/Q830K/ | | | | |
| | G842S/L871E/R883H/Q894G/ | | | | |
| | V913R/S932Y | | | | |
| 607/608 | L24W/L28S/L29V/P39Q/Q50V/ | T29V | + | + | ++ |
| | A62L/P78E/D87E/S135Q/T150S/ | | | | |
| | T266N/R267K/A437G/T486E/E522V/ | | | | |
| | L569T/L670T/T692G/A711H/ | | | | |
| | L736M/A750P/A812E/Q830K/ | | | | |
| | G842S/L871E/R883H/Q894G/ | | | | |
| | V913R/S932A | | | | |
| 609/610 | L24W/L28S/L29T/P39Q/A62L/P78E/ | V50Q | + | + | |
| | D87E/S135Q/T150S/T266N/ | | | | |
| | R267K/A437G/T486E/E522V/L569T/ | | | | |
| | L670T/T692G/A711H/L736M/ | | | | |
| | A750P/A812E/Q830K/G842S/ | | | | |
| | L871E/R883H/Q894G/V913R/S932A | | | | |
| 611/612 | L24W/L28S/L29T/P39Q/Q50V/ | S842L | + | | |
| | A62L/P78E/D87E/S135Q/T150S/ | | | | |
| | T266N/R267K/A437G/T486E/E522V/ | | | | |
| | L569T/L670T/T692G/A711H/ | | | | |
| | L736M/A750P/A812E/Q830K/ | | | | |
| | G842L/L871E/R883H/Q894G/ | | | | |
| | V913R/S932A | | | | |
| 613/614 | L24W/L28S/L29T/P39Q/Q50V/ | G692F | + | ++ | |
| | A62L/P78E/D87E/S135Q/T150S/ | | | | |
| | T266N/R267K/A437G/T486E/E522V/ | | | | |
| | L569T/L670T/T692F/A711H/ | | | | |
| | L736M/A750P/A812E/Q830K/ | | | | |
| | G842S/L871E/R883H/Q894G/ | | | | |
| | V913R/S932A | | | | |
| 615/616 | L24W/L28S/L29R/P39Q/Q50V/ | T29R | + | + | |
| | A62L/P78E/D87E/S135Q/T150S/ | | | | |
| | T266N/R267K/A437G/T486E/E522V/ | | | | |
| | L569T/L670T/T692G/A711H/ | | | | |
| | L736M/A750P/A812E/Q830K/ | | | | |
| | G842S/L871E/R883H/Q894G/ | | | | |
| | V913R/S932A | | | | |
| 617/618 | L24W/L28S/L29T/P39Q/Q50V/ | G894I | + | + | ++ |
| | A62L/P78E/D87E/S135Q/T150S/ | | | | |
| | T266N/R267K/A437G/T486E/E522V/ | | | | |
| | L569T/L670T/T692G/A711H/ | | | | |
| | L736M/A750P/A812E/Q830K/ | | | | |
| | G842S/L871E/R883H/Q894I/ | | | | |
| | V913R/S932A | | | | |
| 619/620 | L24W/L28S/L29T/P39N/Q50V/ | Q39N | | + | + |
| | A62L/P78E/D87E/S135Q/T150S/ | | | | |
| | T266N/R267K/A437G/T486E/E522V/ | | | | |
| | L569T/L670T/T692G/A711H/ | | | | |
| | L736M/A750P/A812E/Q830K/ | | | | |
| | G842S/L871E/R883H/Q894G/ | | | | |
| | V913R/S932A | | | | |
| 621/622 | L24W/L28S/L29T/P39Q/Q50V/ | G692T | | + | |
| | A62L/P78E/D87E/S135Q/T150S/ | | | | |
| | T266N/R267K/A437G/T486E/E522V/ | | | | |
| | L569T/L670T/A711H/L736M/ | | | | |
| | A750P/A812E/Q830K/G842S/ | | | | |
| | L871E/R883H/Q894G/V913R/S932A | | | | |
| 623/624 | L24W/L28S/L29T/P39Q/Q50V/ | N266E | + | + | |
| | A62L/P78E/D87E/S135Q/T150S/ | | | | |
| | T266E/R267K/A437G/T486E/E522V/ | | | | |
| | L569T/L670T/T692G/A711H/ | | | | |
| | L736M/A750P/A812E/Q830K/ | | | | |
| | G842S/L871E/R883H/Q894G/ | | | | |
| | V913R/S932A | | | | |
| 625/626 | L24W/L28S/L29T/P39Q/Q50V/ | E78C | | + | + |
| | A62L/P78C/D87E/S135Q/T150S/ | | | | |
| | T266N/R267K/A437G/T486E/E522V/ | | | | |
| | L569T/L670T/T692G/A711H/ | | | | |
| | L736M/A750P/A812E/Q830K/ | | | | |
| | G842S/L871E/R883H/Q894G/ | | | | |
| | V913R/S932A | | | | |
| 627/628 | L24W/L28S/L29T/P39Q/Q50V/ | G894Q | + | + | |
| | A62L/P78E/D87E/S135Q/T150S/ | | | | |
| | T266N/R267K/A437G/T486E/E522V/ | | | | |
| | L569T/L670T/T692G/A711H/ | | | | |
| | L736M/A750P/A812E/Q830K/ | | | | |
| | G842S/L871E/R883H/V913R/S932A | | | | |
| 629/630 | L24W/L28S/L29T/P39Q/Q50V/ | A932P | | + | |
| | A62L/P78E/D87E/S135Q/T150S/ | | | | |
| | T266N/R267K/A437G/T486E/E522V/ | | | | |
| | L569T/L670T/T692G/A711H/ | | | | |
| | L736M/A750P/A812E/Q830K/ | | | | |
| | G842S/L871E/R883H/Q894G/ | | | | |
| | V913R/S932P | | | | |
| 631/632 | L24W/L28S/L29T/P39Q/Q50V/ | A932D | ++ | ++ | |
| | A62L/P78E/D87E/S135Q/T150S/ | | | | |
| | T266N/R267K/A437G/T486E/E522V/ | | | | |
| | L569T/L670T/T692G/A711H/ | | | | |
| | L736M/A750P/A812E/Q830K/ | | | | |
| | G842S/L871E/R883H/Q894G/ | | | | |
| | V913R/S932D | | | | |
| 633/634 | L24W/L28S/L29T/P39Q/Q50V/ | K830Y | + | + | |
| | A62L/P78E/D87E/S135Q/T150S/ | | | | |
| | T266N/R267K/A437G/T486E/E522V/ | | | | |
| | L569T/L670T/T692G/A711H/ | | | | |
| | L736M/A750P/A812E/Q830Y/ | | | | |
| | G842S/L871E/R883H/Q894G/ | | | | |
| | V913R/S932A | | | | |
| 635/636 | L24W/L28S/L29T/P39Q/Q50V/ | Q135K | + | + | + |
| | A62L/P78E/D87E/S135K/T150S/ | | | | |
| | T266N/R267K/A437G/T486E/E522V/ | | | | |
| | L569T/L670T/T692G/A711H/ | | | | |
| | L736M/A750P/A812E/Q830K/ | | | | |
| | G842S/L871E/R883H/Q894G/ | | | | |
| | V913R/S932A | | | | |
| 637/638 | L24W/L28S/L29T/P39Q/Q50V/ | G692D | + | ++ | |
| | A62L/P78E/D87E/S135Q/T150S/ | | | | |
| | T266N/R267K/A437G/T486E/E522V/ | | | | |
| | L569T/L670T/T692D/A711H/ | | | | |
| | L736M/A750P/A812E/Q830K/ | | | | |
| | G842S/L871E/R883H/Q894G/ | | | | |
| | V913R/S932A | | | | |
| 639/640 | L24W/L28G/L29T/P39Q/Q50V/ | S28G | + | + | |
| | A62L/P78E/D87E/S135Q/T150S/ | | | | |
| | T266N/R267K/A437G/T486E/E522V/ | | | | |
| | L569T/L670T/T692G/A711H/ | | | | |
| | L736M/A750P/A812E/Q830K/ | | | | |
| | G842S/L871E/R883H/Q894G/ | | | | |
| | V913R/S932A | | | | |
| 641/642 | L24W/L28S/L29T/P39Q/Q50V/ | H711N | + | ++ | + |
| | A62L/P78E/D87E/S135Q/T150S/ | | | | |
| | T266N/R267K/A437G/T486E/E522V/ | | | | |
| | L569T/L670T/T692G/A711N/ | | | | |
| | L736M/A750P/A812E/Q830K/ | | | | |
| | G842S/L871E/R883H/Q894G/ | | | | |
| | V913R/S932A | | | | |
| 643/644 | L24W/L28S/L29T/P39Q/Q50V/ | E486W | | | ++ |
| | A62L/P78E/D87E/S135Q/T150S/ | | | | |
| | T266N/R267K/A437G/T486W/E522V/ | | | | |
| | L569T/L670T/T692G/A711H/ | | | | |
| | L736M/A750P/A812E/Q830K/ | | | | |
| | G842S/L871E/R883H/Q894G/ | | | | |
| | V913R/S932A | | | | |
| 645/646 | L24W/L28S/L29T/P39Q/Q50D/ | V50D | + | ++ | |
| | A62L/P78E/D87E/S135Q/T150S/ | | | | |
| | T266N/R267K/A437G/T486E/E522V/ | | | | |
| | L569T/L670T/T692G/A711H/ | | | | |
| | L736M/A750P/A812E/Q830K/ | | | | |
| | G842S/L871E/R883H/Q894G/ | | | | |
| | V913R/S932A | | | | |
| 647/648 | L24W/L28S/L29T/P39Q/Q50V/ | E486A | + | + | ++ |
| | A62L/P78E/D87E/S135Q/T150S/ | | | | |
| | T266N/R267K/A437G/T486A/E522V/ | | | | |
| | L569T/L670T/T692G/A711H/ | | | | |
| | L736M/A750P/A812E/Q830K/ | | | | |
| | G842S/L871E/R883H/Q894G/ | | | | |
| | V913R/S932A | | | | |
| 649/650 | L24W/L28S/L29T/P39Q/Q50V/ | G894N | + | ++ | + |
| | A62L/P78E/D87E/S135Q/T150S/ | | | | |
| | T266N/R267K/A437G/T486E/E522V/ | | | | |
| | L569T/L670T/T692G/A711H/ | | | | |
| | L736M/A750P/A812E/Q830K/ | | | | |
| | G842S/L871E/R883H/Q894N/ | | | | |
| | V913R/S932A | | | | |
| 651/652 | L24W/L28S/L29T/P39Q/Q50V/ | A932G | + | + | ++ |
| | A62L/P78E/D87E/S135Q/T150S/ | | | | |
| | T266N/R267K/A437G/T486E/E522V/ | | | | |
| | L569T/L670T/T692G/A711H/ | | | | |
| | L736M/A750P/A812E/Q830K/ | | | | |
| | G842S/L871E/R883H/Q894G/ | | | | |
| | V913R/S932G | | | | |
| 653/654 | L24W/L28S/L29T/P39Q/Q50V/ | H711D | + | + | |
| | A62L/P78E/D87E/S135Q/T150S/ | | | | |
| | T266N/R267K/A437G/T486E/E522V/ | | | | |
| | L569T/L670T/T692G/A711D/ | | | | |
| | L736M/A750P/A812E/Q830K/ | | | | |
| | G842S/L871E/R883H/Q894G/ | | | | |
| | V913R/S932A | | | | |
| 655/656 | L24W/L28S/L29T/P39Q/Q50V/ | N266T | + | | |
| | A62L/P78E/D87E/S135Q/T150S/ | | | | |
| | R267K/A437G/T486E/E522V/L569T/ | | | | |
| | L670T/T692G/A711H/L736M/ | | | | |
| | A750P/A812E/Q830K/G842S/ | | | | |
| | L871E/R883H/Q894G/V913R/S932A | | | | |
| 657/658 | L24W/L28S/L29T/P39Q/Q50V/ | E871H | ++ | ++ | + |
| | A62L/P78E/D87E/S135Q/T150S/ | | | | |
| | T266N/R267K/A437G/T486E/E522V/ | | | | |
| | L569T/L670T/T692G/A711H/ | | | | |
| | L736M/A750P/A812E/Q830K/ | | | | |
| | G842S/L871H/R883H/Q894G/ | | | | |
| | V913R/S932A | | | | |
| 659/660 | L24W/L28S/L29T/P39Q/Q50V/ | E486H | + | + | +++ |
| | A62L/P78E/D87E/S135Q/T150S/ | | | | |
| | T266N/R267K/A437G/T486H/E522V/ | | | | |
| | L569T/L670T/T692G/A711H/ | | | | |
| | L736M/A750P/A812E/Q830K/ | | | | |
| | G842S/L871E/R883H/Q894G/ | | | | |
| | V913R/S932A | | | | |
| 661/662 | L24W/L28S/L29T/P39Q/Q50V/ | R913K | + | + | |
| | A62L/P78E/D87E/S135Q/T150S/ | | | | |
| | T266N/R267K/A437G/T486E/E522V/ | | | | |
| | L569T/L670T/T692G/A711H/ | | | | |
| | L736M/A750P/A812E/Q830K/ | | | | |
| | G842S/L871E/R883H/Q894G/ | | | | |
| | V913K/S932A | | | | |
| 663/664 | L24W/L28S/L29T/P39Q/Q50V/ | E871M | + | + | + |
| | A62L/P78E/D87E/S135Q/T150S/ | | | | |
| | T266N/R267K/A437G/T486E/E522V/ | | | | |
| | L569T/L670T/T692G/A711H/ | | | | |
| | L736M/A750P/A812E/Q830K/ | | | | |
| | G842S/L871M/R883H/Q894G/ | | | | |
| | V913R/S932A | | | | |
| 665/666 | L24W/L28S/L29T/P39E/Q50V/A62L/ | Q39E | + | + | |
| | P78E/D87E/S135Q/T150S/T266N/ | | | | |
| | R267K/A437G/T486E/E522V/ | | | | |
| | L569T/L670T/T692G/A711H/ | | | | |
| | L736M/A750P/A812E/Q830K/ | | | | |
| | G842S/L871E/R883H/Q894G/ | | | | |
| | V913R/S932A | | | | |
| 667/668 | L24W/L28S/L29T/P39Q/Q50V/ | A932N | ++ | ++ | + |
| | A62L/P78E/D87E/S135Q/T150S/ | | | | |
| | T266N/R267K/A437G/T486E/E522V/ | | | | |
| | L569T/L670T/T692G/A711H/ | | | | |
| | L736M/A750P/A812E/Q830K/ | | | | |
| | G842S/L871E/R883H/Q894G/ | | | | |
| | V913R/S932N | | | | |
| 669/670 | L24W/L28S/L29T/P39Q/Q50V/ | A932M | | + | |
| | A62L/P78E/D87E/S135Q/T150S/ | | | | |
| | T266N/R267K/A437G/T486E/E522V/ | | | | |
| | L569T/L670T/T692G/A711H/ | | | | |
| | L736M/A750P/A812E/Q830K/ | | | | |
| | G842S/L871E/R883H/Q894G/ | | | | |
| | V913R/S932M | | | | |
| 671/672 | L24W/L28S/L29T/P39Q/Q50V/ | R913M | + | + | + |
| | A62L/P78E/D87E/S135Q/T150S/ | | | | |
| | T266N/R267K/A437G/T486E/E522V/ | | | | |
| | L569T/L670T/T692G/A711H/ | | | | |
| | L736M/A750P/A812E/Q830K/ | | | | |
| | G842S/L871E/R883H/Q894G/ | | | | |
| | V913M/S932A | | | | |
| 673/674 | L24W/L28S/L29T/P39Q/Q50V/ | T569W | + | + | ++ |
| | A62L/P78E/D87E/S135Q/T150S/ | | | | |
| | T266N/R267K/A437G/T486E/ | | | | |
| | E522V/L569W/L670T/T692G/A711H/ | | | | |
| | L736M/A750P/A812E/Q830K/ | | | | |
| | G842S/L871E/R883H/Q894G/ | | | | |
| | V913R/S932A | | | | |
| 675/676 | L24W/L28S/L29T/P39Q/Q50V/ | E486S | + | + | + |
| | A62L/P78E/D87E/S135Q/T150S/ | | | | |
| | T266N/R267K/A437G/T486S/E522V/ | | | | |
| | L569T/L670T/T692G/A711H/ | | | | |
| | L736M/A750P/A812E/Q830K/ | | | | |
| | G842S/L871E/R883H/Q894G/ | | | | |
| | V913R/S932A | | | | |
| 677/678 | L24W/L28S/L29T/P39Q/Q50V/ | H711I | + | + | |
| | A62L/P78E/D87E/S135Q/T150S/ | | | | |
| | T266N/R267K/A437G/T486E/E522V/ | | | | |
| | L569T/L670T/T692G/A711I/ | | | | |
| | L736M/A750P/A812E/Q830K/ | | | | |
| | G842S/L871E/R883H/Q894G/ | | | | |
| | V913R/S932A | | | | |
| 679/680 | L24W/L28S/L29T/P39Q/Q50V/ | H711C | + | + | |
| | A62L/P78E/D87E/S135Q/T150S/ | | | | |
| | T266N/R267K/A437G/T486E/E522V/ | | | | |
| | L569T/L670T/T692G/A711C/ | | | | |
| | L736M/A750P/A812E/Q830K/ | | | | |
| | G842S/L871E/R883H/Q894G/ | | | | |
| | V913R/S932A | | | | |
| 681/682 | L24W/L28S/L29T/P39Q/Q50W/ | V50W | + | + | + |
| | A62L/P78E/D87E/S135Q/T150S/ | | | | |
| | T266N/R267K/A437G/T486E/E522V/ | | | | |
| | L569T/L670T/T692G/A711H/ | | | | |
| | L736M/A750P/A812E/Q830K/ | | | | |
| | G842S/L871E/R883H/Q894G/ | | | | |
| | V913R/S932A | | | | |
| 683/684 | L24W/L28S/L29T/P39Q/Q50V/ | V522C | + | + | |
| | A62L/P78E/D87E/S135Q/T150S/ | | | | |
| | T266N/R267K/A437G/T486E/E522C/ | | | | |
| | L569T/L670T/T692G/A711H/ | | | | |
| | L736M/A750P/A812E/Q830K/ | | | | |
| | G842S/L871E/R883H/Q894G/ | | | | |
| | V913R/S932A | | | | |
| 685/686 | L24W/L28S/L29T/P39Q/Q50V/ | E486T | + | ++ | + |
| | A62L/P78E/D87E/S135Q/T150S/ | | | | |
| | T266N/R267K/A437G/E522V/L569T/ | | | | |
| | L670T/T692G/A711H/L736M/ | | | | |
| | A750P/A812E/Q830K/G842S/ | | | | |
| | L871E/R883H/Q894G/V913R/S932A | | | | |
| 687/688 | L24W/L28S/L29T/P39Q/Q50V/ | A932S | ++ | ++ | + |
| | A62L/P78E/D87E/S135Q/T150S/ | | | | |
| | T266N/R267K/A437G/T486E/E522V/ | | | | |
| | L569T/L670T/T692G/A711H/ | | | | |
| | L736M/A750P/A812E/Q830K/ | | | | |
| | G842S/L871E/R883H/Q894G/V913R | | | | |
| 689/690 | L24W/L28S/L29W/P39Q/Q50V/ | T29W | ++ | | ++ |
| | A62L/P78E/D87E/S135Q/T150S/ | | | | |
| | T266N/R267K/A437G/T486E/E522V/ | | | | |
| | L569T/L670T/T692G/A711H/ | | | | |
| | L736M/A750P/A812E/Q830K/ | | | | |
| | G842S/L871E/R883H/Q894G/ | | | | |
| | V913R/S932A | | | | |
| 691/692 | L24W/L28S/L29T/P39Q/Q50V/ | E812G | + | + | ++ |
| | A62L/P78E/D87E/S135Q/T150S/ | | | | |
| | T266N/R267K/A437G/T486E/E522V/ | | | | |
| | L569T/L670T/T692G/A711H/ | | | | |
| | L736M/A750P/A812G/Q830K/ | | | | |
| | G842S/L871E/R883H/Q894G/ | | | | |
| | V913R/S932A | | | | |
| 693/694 | L24W/L28S/L29T/P39Q/Q50V/ | E78D | + | ++ | +++ |
| | A62L/P78D/D87E/S135Q/T150S/ | | | | |
| | T266N/R267K/A437G/T486E/ | | | | |
| | E522V/L569T/L670T/T692G/A711H/ | | | | |
| | L736M/A750P/A812E/Q830K/ | | | | |
| | G842S/L871E/R883H/Q894G/ | | | | |
| | V913R/S932A | | | | |
| 695/696 | L24W/L28S/L29T/P39Q/Q50V/ | E871D | + | + | ++ |
| | A62L/P78E/D87E/S135Q/T150S/ | | | | |
| | T266N/R267K/A437G/T486E/E522V/ | | | | |
| | L569T/L670T/T692G/A711H/ | | | | |
| | L736M/A750P/A812E/Q830K/ | | | | |
| | G842S/L871D/R883H/Q894G/ | | | | |
| | V913R/S932A | | | | |
| 697/698 | L24W/L28S/L29T/P39Q/Q50V/ | G692I | | + | + |
| | A62L/P78E/D87E/S135Q/T150S/ | | | | |
| | T266N/R267K/A437G/T486E/E522V/ | | | | |
| | L569T/L670T/T692I/A711H/ | | | | |
| | L736M/A750P/A812E/Q830K/ | | | | |
| | G842S/L871E/R883H/Q894G/ | | | | |
| | V913R/S932A | | | | |
| 699/700 | L24W/L28S/L29F/P39Q/Q50V/A62L/ | T29F | + | | ++ |
| | P78E/D87E/S135Q/T150S/T266N/ | | | | |
| | R267K/A437G/T486E/E522V/ | | | | |
| | L569T/L670T/T692G/A711H/ | | | | |
| | L736M/A750P/A812E/Q830K/ | | | | |
| | G842S/L871E/R883H/Q894G/ | | | | |
| | V913R/S932A | | | | |
| 701/702 | L24W/L28S/L29T/P39Q/Q50V/ | V522M | + | + | |
| | A62L/P78E/D87E/S135Q/T150S/ | | | | |
| | T266N/R267K/A437G/T486E/E522M/ | | | | |
| | L569T/L670T/T692G/A711H/ | | | | |
| | L736M/A750P/A812E/Q830K/ | | | | |
| | G842S/L871E/R883H/Q894G/ | | | | |
| | V913R/S932A | | | | |
| 703/704 | L24W/L28S/L29T/P39Q/Q50V/ | T670N | + | + | + |
| | A62L/P78E/D87E/S135Q/T150S/ | | | | |
| | T266N/R267K/A437G/T486E/E522V/ | | | | |
| | L569T/L670N/T692G/A711H/ | | | | |
| | L736M/A750P/A812E/Q830K/ | | | | |
| | G842S/L871E/R883H/Q894G/ | | | | |
| | V913R/S932A | | | | |
| 705/706 | L24W/L28S/L29M/P39Q/Q50V/ | T29M | + | + | |
| | A62L/P78E/D87E/S135Q/T150S/ | | | | |
| | T266N/R267K/A437G/T486E/E522V/ | | | | |
| | L569T/L670T/T692G/A711H/ | | | | |
| | L736M/A750P/A812E/Q830K/ | | | | |
| | G842S/L871E/R883H/Q894G/ | | | | |
| | V913R/S932A | | | | |
| 707/708 | L24W/L28S/L29T/P39Q/Q50V/ | E486G | + | + | + |
| | A62L/P78E/D87E/S135Q/T150S/ | | | | |
| | T266N/R267K/A437G/T486G/E522V/ | | | | |
| | L569T/L670T/T692G/A711H/ | | | | |
| | L736M/A750P/A812E/Q830K/ | | | | |
| | G842S/L871E/R883H/Q894G/ | | | | |
| | V913R/S932A | | | | |
| 709/710 | L24W/L28S/L29T/P39Q/Q50V/ | A932K | | | +++ |
| | A62L/P78E/D87E/S135Q/T150S/ | | | | |
| | T266N/R267K/A437G/T486E/E522V/ | | | | |
| | L569T/L670T/T692G/A711H/ | | | | |
| | L736M/A750P/A812E/Q830K/ | | | | |
| | G842S/L871E/R883H/Q894G/ | | | | |
| | V913R/S932K | | | | |
| 711/712 | L24W/L28S/L29T/P39Q/Q50V/ | L62Q | | + | |
| | A62Q/P78E/D87E/S135Q/T150S/ | | | | |
| | T266N/R267K/A437G/T486E/E522V/ | | | | |
| | L569T/L670T/T692G/A711H/ | | | | |
| | L736M/A750P/A812E/Q830K/ | | | | |
| | G842S/L871E/R883H/Q894G/ | | | | |
| | V913R/S932A | | | | |
| 713/714 | L24W/L28S/L29T/P39Q/Q50V/ | K830S | | + | |
| | A62L/P78E/D87E/S135Q/T150S/ | | | | |
| | T266N/R267K/A437G/T486E/E522V/ | | | | |
| | L569T/L670T/T692G/A711H/ | | | | |
| | L736M/A750P/A812E/Q830S/ | | | | |
| | G842S/L871E/R883H/Q894G/ | | | | |
| | V913R/S932A | | | | |
| 715/716 | L24W/L28S/L29T/P39Q/Q50V/ | E812S | + | + | ++ |
| | A62L/P78E/D87E/S135Q/T150S/ | | | | |
| | T266N/R267K/A437G/T486E/E522V/ | | | | |
| | L569T/L670T/T692G/A711H/ | | | | |
| | L736M/A750P/A812S/Q830K/ | | | | |
| | G842S/L871E/R883H/Q894G/ | | | | |
| | V913R/S932A | | | | |
| 717/718 | L24W/L28S/L29T/P39Q/Q50V/ | K830G | + | + | |
| | A62L/P78E/D87E/S135Q/T150S/ | | | | |
| | T266N/R267K/A437G/T486E/E522V/ | | | | |
| | L569T/L670T/T692G/A711H/ | | | | |
| | L736M/A750P/A812E/Q830G/ | | | | |
| | G842S/L871E/R883H/Q894G/ | | | | |
| | V913R/S932A | | | | |
| 719/720 | L24W/L28S/L29T/P39Q/Q50V/ | E486M | + | ++ | +++ |
| | A62L/P78E/D87E/S135Q/T150S/ | | | | |
| | T266N/R267K/A437G/T486M/E522V/ | | | | |
| | L569T/L670T/T692G/A711H/ | | | | |
| | L736M/A750P/A812E/Q830K/ | | | | |
| | G842S/L871E/R883H/Q894G/ | | | | |
| | V913R/S932A | | | | |
| 721/722 | L24W/L28S/L29T/P39Q/Q50V/ | H711K | + | ++ | |
| | A62L/P78E/D87E/S135Q/T150S/ | | | | |
| | T266N/R267K/A437G/T486E/E522V/ | | | | |
| | L569T/L670T/T692G/A711K/ | | | | |
| | L736M/A750P/A812E/Q830K/ | | | | |
| | G842S/L871E/R883H/Q894G/ | | | | |
| | V913R/S932A | | | | |
| 723/724 | L24W/L28S/L29T/P39Q/Q50V/ | A932H | ++ | ++ | +++ |
| | A62L/P78E/D87E/S135Q/T150S/ | | | | |
| | T266N/R267K/A437G/T486E/E522V/ | | | | |
| | L569T/L670T/T692G/A711H/ | | | | |
| | L736M/A750P/A812E/Q830K/ | | | | |
| | G842S/L871E/R883H/Q894G/ | | | | |
| | V913R/S932H | | | | |
| 725/726 | L24W/L28S/L29P/P39Q/Q50V/A62L/ | T29P | ++ | + | |
| | P78E/D87E/S135Q/T150S/T266N/ | | | | |
| | R267K/A437G/T486E/E522V/ | | | | |
| | L569T/L670T/T692G/A711H/ | | | | |
| | L736M/A750P/A812E/Q830K/ | | | | |
| | G842S/L871E/R883H/Q894G/ | | | | |
| | V913R/S932A | | | | |
| 727/728 | L24W/L28S/L29T/P39Q/Q50V/ | G692W | + | + | |
| | A62L/P78E/D87E/S135Q/T150S/ | | | | |
| | T266N/R267K/A437G/T486E/E522V/ | | | | |
| | L569T/L670T/T692W/A711H/ | | | | |
| | L736M/A750P/A812E/Q830K/ | | | | |
| | G842S/L871E/R883H/Q894G/ | | | | |
| | V913R/S932A | | | | |
| 729/730 | L24W/L28S/L29Y/P39Q/Q50V/ | T29Y | + | + | ++ |
| | A62L/P78E/D87E/S135Q/T150S/ | | | | |
| | T266N/R267K/A437G/T486E/E522V/ | | | | |
| | L569T/L670T/T692G/A711H/ | | | | |
| | L736M/A750P/A812E/Q830K/ | | | | |
| | G842S/L871E/R883H/Q894G/ | | | | |
| | V913R/S932A | | | | |
| 731/732 | L24W/L28S/L29T/P39Q/Q50V/ | G692C | + | + | + |
| | A62L/P78E/D87E/S135Q/T150S/ | | | | |
| | T266N/R267K/A437G/T486E/E522V/ | | | | |
| | L569T/L670T/T692C/A711H/ | | | | |
| | L736M/A750P/A812E/Q830K/ | | | | |
| | G842S/L871E/R883H/Q894G/ | | | | |
| | V913R/S932A | | | | |
| 733/734 | L24W/L28S/L29G/P39Q/Q50V/ | T29G | + | | |
| | A62L/P78E/D87E/S135Q/T150S/ | | | | |
| | T266N/R267K/A437G/T486E/E522V/ | | | | |
| | L569T/L670T/T692G/A711H/ | | | | |
| | L736M/A750P/A812E/Q830K/ | | | | |
| | G842S/L871E/R883H/Q894G/ | | | | |
| | V913R/S932A | | | | |
| 735/736 | L24W/L28S/L29T/P39Q/Q50V/ | E812D | | + | + |
| | A62L/P78E/D87E/S135Q/T150S/ | | | | |
| | T266N/R267K/A437G/T486E/E522V/ | | | | |
| | L569T/L670T/T692G/A711H/ | | | | |
| | L736M/A750P/A812D/Q830K/ | | | | |
| | G842S/L871E/R883H/Q894G/ | | | | |
| | V913R/S932A | | | | |
| 737/738 | L24W/L28S/L29T/P39Q/Q50V/ | A932C | ++ | + | +++ |
| | A62L/P78E/D87E/S135Q/T150S/ | | | | |
| | T266N/R267K/A437G/T486E/E522V/ | | | | |
| | L569T/L670T/T692G/A711H/ | | | | |
| | L736M/A750P/A812E/Q830K/ | | | | |
| | G842S/L871E/R883H/Q894G/ | | | | |
| | V913R/S932C | | | | |
| 739/740 | L24W/L28S/L29T/P39Q/Q50V/ | E871I | + | + | |
| | A62L/P78E/D87E/S135Q/T150S/ | | | | |
| | T266N/R267K/A437G/T486E/E522V/ | | | | |
| | L569T/L670T/T692G/A711H/ | | | | |
| | L736M/A750P/A812E/Q830K/ | | | | |
| | G842S/L871I/R883H/Q894G/ | | | | |
| | V913R/S932A | | | | |
| 741/742 | L24W/L28S/L29T/P39Q/Q50V/ | G692Y | + | + | |
| | A62L/P78E/D87E/S135Q/T150S/ | | | | |
| | T266N/R267K/A437G/T486E/E522V/ | | | | |
| | L569T/L670T/T692Y/A711H/ | | | | |
| | L736M/A750P/A812E/Q830K/ | | | | |
| | G842S/L871E/R883H/Q894G/ | | | | |
| | V913R/S932A | | | | |
| 743/744 | L24W/L28S/L29T/P39Q/Q50V/ | P750Q | + | + | ++ |
| | A62L/P78E/D87E/S135Q/T150S/ | | | | |
| | T266N/R267K/A437G/T486E/E522V/ | | | | |
| | L569T/L670T/T692G/A711H/ | | | | |
| | L736M/A750Q/A812E/Q830K/ | | | | |
| | G842S/L871E/R883H/Q894G/ | | | | |
| | V913R/S932A | | | | |
| 745/746 | L24W/L28S/L29T/P39Q/Q50V/ | K830H | + | + | |
| | A62L/P78E/D87E/S135Q/T150S/ | | | | |
| | T266N/R267K/A437G/T486E/E522V/ | | | | |
| | L569T/L670T/T692G/A711H/ | | | | |
| | L736M/A750P/A812E/Q830H/ | | | | |
| | G842S/L871E/R883H/Q894G/ | | | | |
| | V913R/S932A | | | | |
| 747/748 | L24W/L28S/L29T/P39Q/Q50V/ | S842C | + | | |
| | A62L/P78E/D87E/S135Q/T150S/ | | | | |
| | T266N/R267K/A437G/T486E/E522V/ | | | | |
| | L569T/L670T/T692G/A711H/ | | | | |
| | L736M/A750P/A812E/Q830K/ | | | | |
| | G842C/L871E/R883H/Q894G/ | | | | |
| | V913R/S932A | | | | |
| 749/750 | L24W/L28S/L29T/P39Q/Q50V/ | E871S | + | ++ | + |
| | A62L/P78E/D87E/S135Q/T150S/ | | | | |
| | T266N/R267K/A437G/T486E/E522V/ | | | | |
| | L569T/L670T/T692G/A711H/ | | | | |
| | L736M/A750P/A812E/Q830K/ | | | | |
| | G842S/L871S/R883H/Q894G/ | | | | |
| | V913R/S932A | | | | |
| 751/752 | L24W/L28S/L29T/P39Q/Q50V/ | E871C | + | + | ++ |
| | A62L/P78E/D87E/S135Q/T150S/ | | | | |
| | T266N/R267K/A437G/T486E/E522V/ | | | | |
| | L569T/L670T/T692G/A711H/ | | | | |
| | L736M/A750P/A812E/Q830K/ | | | | |
| | G842S/L871C/R883H/Q894G/ | | | | |
| | V913R/S932A | | | | |
| 753/754 | L24W/L28S/L29T/P39Q/Q50V/ | R913W | + | + | |
| | A62L/P78E/D87E/S135Q/T150S/ | | | | |
| | T266N/R267K/A437G/T486E/E522V/ | | | | |
| | L569T/L670T/T692G/A711H/ | | | | |
| | L736M/A750P/A812E/Q830K/ | | | | |
| | G842S/L871E/R883H/Q894G/ | | | | |
| | V913W/S932A | | | | |

¹All activities were determined relative to the reference polypeptide of SEQ ID NO: 12. Levels of increased activity are defined as follows: “+” 0.9-1.1, “++” >1.1, “+++” >1.5, “++++” >2.5

### Example 4

### Production of GAA Variants

### Production of GAA in EXPI293F™ Cells

[0287] Milligram-scale production of GAA variants was achieved by transient transfection of EXPI293F™ cells (ThermoFisher Scientific) using the lipofection method with EXPIFECTAMINE™ 293 Reagent (ThermoFisher Scientific) in EXPI293™ Expression Medium (ThermoFisher Scientific). GAA variants fused to an N-terminal synthetic mammalian signal peptide were subcloned into the mammalian expression vectors pDH or pcDNA 3.1(+) as described in Example 1. EXPI293F™ cells were transfected with plasmid DNA and grown in suspension for 4-7 days. Conditioned media was then harvested, clarified by centrifugation and filtration or diatomaceous earth and stored at −80° C. until purification.

### Example 5

### Purification of GAA Variants

[0288] GAA variants (SEQ ID NO: 2, 4, 12, 8, 6, 14, 10) produced in EXPI293F™ cells as described in Example 4, were purified from mammalian culture supernatant as described in the literature (Yasuda et al., Prot. Exp. Pur., 2004, 37:499-506). Concanavalin A resin (Sigma Aldrich) was equilibrated with 0.1M sodium acetate, 0.1M NaCl, 1 mM MgCl₂, CaCl₂, and MnCl₂, pH 6.0 (Concanavalin A binding buffer). Supernatant was concentrated 10-fold and diluted 2-fold into equilibration buffer (0.1M sodium acetate, 0.1M NaCl, 1 mM MgCl₂, CaCl₂, and MnCl₂, pH 6.0) before it was loaded onto the column. After loading, the column was washed with 10 column volumes of Concanavalin A binding buffer and the bound protein was eluted with Concanavalin A binding buffer supplemented with 0.9M methyl-α-D-mannopyranoside and 0.9M methyl-α-D-glucopyranoside. Eluted protein was concentrated, and the buffer exchanged into storage buffer (20 mM sodium phosphate, 150 mM sodium chloride, 185 μM TWEEN®-20 non-ionic detergent, pH 6.0) using an AMICON® Ultra 15 mL filtration unit with a 50 kDa molecular weight cut off membrane (Millipore). The GAA in storage buffer was sterile filtered through ANOTOP® 0.2 μm syringe filters (Whatman), and stored at −80° C. The purification process produced 60-100 mg of purified protein/L of culture supernatant.

### Example 6

### In Vitro Characterization of GAA Variants

[0289] In this Example, experiments conducted to characterize GAA variants produced as indicated herein are described.

Stability at Neutral pH of rhGAA and GAA Variants

[0290] GAA variant stability to neutral pH was determined by incubating purified variants at 214 nM in MEM complete growth medium (pH 7.4) in a 96-well plate. The plates were incubated at 37° C. for up to 144 hours. At each timepoint, 10 μL of neutral-pH-challenged sample was transferred into a BioRad hardshell plate and frozen immediately at −80° C. At the conclusion of experiment all plates were processed simultaneously via addition of 50 μL of 1.5 mM 4-MU-GLU in McIlvaine Buffer for 30 minutes, with agitation at 400 rpm, at 37° C. Reactions were quenched with 100 μL of Na₂CO₃ (0.5M, pH 10.5), 100 μL was transferred into a black 96 well plate and hydrolysis was assessed by quantifying the released fluorescent methylumbelliferone, using an Envision microplate reader (ex 355/em 460 nm). The results from this assay are presented in FIG. 1.

Melting Temperature of rhGAA and GAA Variants at Neutral and Lysosomal pH

[0291] The melting temperature of rhGAA and GAA variants was determined by differential scanning fluorimetry at neutral and lysosomal pH. GAA enzyme variants were diluted to 1 mg/mL in DPBS (pH 6.2). 40 μL of pH 4.4 or pH 7.4 McIlvaine Buffer containing 1×SYPRO Orange was mixed with 10 μL of each enzyme solution (n=3) in separate wells of 96-well skirted BioRad plates. The plates were sealed with optically clear film and run on a CFX connect real-time PCR system using the manufacturer's recommended method from 25-95° C. Data were analyzed by BioRad Software. The results of these assays are presented in FIG. 2.

Stability in Plasma of rhGAA and GAA Variants

[0292] GAA variant stability to cynomolgus plasma was assessed over a time course 75 hours. Purified GAA variants were diluted into GAA storage buffer (20 mM Sodium Phosphate, 150 mM NaCl, 185 μM polysorbate 20, pH 6.0) to 100 μg/mL (2×assay concentration) and dispensed in triplicate (100 μL/well) into a BioRad hardshell plate. 100 μL of cynomolgus plasma was added and mixed thoroughly. The plasma challenge plate was sealed and incubated for up to 75 hours with agitation (400 rpm) at 37° C. At timepoints across the challenge time, the residual activity remaining of GAA variants was measured by transferring 10 μL of the plasma-challenged solution into 50 μL of 1.5 mM 4-MU-GLU in McIlvaine Buffer, pH 4.4, in black 96-well plates for 30 minutes with agitation (400 rpm) at 37° C. Reactions were quenched with 100 μL of Na₂CO₃ (0.5M, pH 10.5), and hydrolysis was assessed by quantifying the released fluorescent methylumbelliferone using an Envision microplate reader (ex 355/em 460 nm). The results from this assay are presented in FIG. 3.

### Cellular Uptake in Pompe Fibroblasts or C2C12 GAA Knockout Myoblasts of Purified GAA Variants

[0293] The capability of GAA variants for cross-correction of cells as compared to reference enzymes (SEQ ID NOS: 2 and 4) was determined. Pompe fibroblasts (GM00248, Coriell Institute for Medical Research) or C2C12 GAA knockout myoblasts were seeded into a black walled, clear bottom 96-well plate (Costar, #3604) in standard complete growth medium and allowed to reach confluency (2-3 days at 37° C., 5% CO₂). After reaching confluency, standard complete growth medium was removed using an automated BioMek i5 liquid handler. Enzymes purified as described in Example 5, were added to cells in a dilution series of concentrations ranging from 0-214 nM GAA/mL in standard complete growth media and allowed to incubate for 1, 4, 24 or 96 hours at 37° C., 5% CO₂. At the conclusion of treatment, media containing GAA variants were aspirated using an automated BioMek i5 liquid handler. The cells were briefly washed with 150 μL 1×DPBS/well, and the DPBS was removed by an automated BioMek i5 liquid handler. Then, 200 μL standard complete growth medium was added to each well, and the plates were returned to the incubator for the remainder of the 96 hour experiment (95 to 0 hr, depending on treatment time). At the conclusion of experiment, MEM complete growth media was removed using an automated BioMek i5 liquid handler. The cells were washed with 150 μL 1×DPBS/well, and the DPBS was removed using an automated BioMek i5 liquid handler. Cells were lysed via addition of 50 μL of McIlvaine buffer, pH 4.4, supplemented with 0.5% TRITON X-100™ non-ionic surfactant (Sigma #93443) and agitation at room temperature for 30 minutes. GAA activity was assessed by addition of 50 μL of 1.5 mM 4-MU-GLU in McIlvaine buffer, pH 4.4. The plates were sealed, incubated at 37° C. for 300-360 minutes with agitation at 400 rpm, prior to quenching with 100 μL of 0.5M sodium carbonate pH 10.5. Hydrolysis was analyzed using an EnVision (Perkin Elmer) microplate reader monitoring fluorescence (Ex. 355 nm, Em. 460 nm). FIG. 4, Panels A, B, C, and D provide graphs showing the activity in Pompe fibroblast lysates following treatment with purified GAA variants for durations of 1 to 96 hours. FIG. 5, Panels A, B, C, and D provide graphs showing the activity in C2C12 GAA KO myoblast lysates of purified GAA variants for durations of 1 to 96 hours.

### Example 7

### In Vitro Characterization of GAA Variant Expression in Myoblasts

[0294] In this Example, experiments conducted to characterize expression and activity of GAA variants in myoblasts as indicated herein are described.

rhGAA and GAA Variant 4-MU-GLU and Glycogen Hydrolysis Activity in Transiently Transfected Myoblasts

[0295] The expression efficiency and activity of wild type GAA and GAA variants was assessed in myoblasts using transient transfection. C2C12 GAA knockout myoblasts were seeded into 12-well plates in complete growth medium (Dulbecco's Modified Eagle's Medium with 10% fetal bovine serum) and allowed to adhere for 24 hours to a confluency of ˜50%. Cells were transfected with plasmid DNA of GAA variants using jetOPTIMUS® transfection polyplus. Plates were returned to the incubator for 4 hours before a media exchange. At 3 days post-transfection the conditioned media was assessed for GAA activity and myoblasts were harvested to assess GAA activity in lysates. GAA activity in conditioned media was determined against 4-MU-GLU, and was assessed via incubation of 20 μL of conditioned media with 50 μL of 1.5 mM 4-MU-GLU in McIlvaine Buffer, pH 4.4, in black 96-well plates for 4 hours with agitation (400 rpm) at 37° C. Hydrolysis was assessed by quantifying the released fluorescent methylumbelliferone, using an Envision microplate reader (ex 355/em 460 nm). To generate lysates, myoblasts were harvested with trypsin and centrifugation. Cell pellets were washed with DPBS and lysed in 52 μL GAA lysis buffer (0.2M sodium acetate, 0.4M potassium chloride, 0.5% Triton X-100, pH 4.3) on ice with intermittent vortexing for 30 minutes. Lysates were clarified (10 minutes at 20,000 RCF) and protein concentration was determined by BCA and normalized. GAA activity in lysates against 4-MU-GLU was assessed via incubation of 2 or 4 μL of normalized lysate with 50 μL of 1.5 mM 4-MU-GLU in McIlvaine Buffer, pH 4.4, in black 96-well plates for 4 hours with agitation (400 rpm) at 37° C. Hydrolysis was assessed by quantifying the released fluorescent methylumbelliferone, using an Envision microplate reader (ex 355/em 460 nm). Glycogen hydrolysis activity of lysates was determined by incubation of lysates with glycogen (100 mg/ml prepared in GAA reaction buffer of 0.1M sodium acetate, 0.1M NaCl, 0.5 mg/mL BSA at pH 4.3) for 1 hour at 37° C., 400 rpm. Glycogen hydrolysis reactions were quenched/neutralized via addition of 90 μL of stop buffer (133 mM glycine, 83 mM sodium carbonate, pH 10.7). Quenched hydrolysis reactions were diluted 1:20 in Amplex red reaction buffer (Invitrogen Amplex Red Glucose/Glucose Oxidase Assay Kit #A22189). 50 μL of quenched hydrolysis reaction dilutions and 50 μL of glucose standards (at 0, 3.2, 6.25, 12.5, 25, 50, and 100 μM) were added to a black 96-well plate. 50 μL of the Amplex Reagent Mix (Amplex Red/HRP/Glucose oxidase) was added to all wells and the plate was incubated at room temperature with gentle shaking, protected from light for 30 minutes. Red fluorescent resorufin (formed from the reaction of Amplex Red with hydrogen peroxide produced from the glucose oxidase—HRP coupled reactions) was quantified with a Spectramax EM microplate reader (ex 540/em 590 nm). FIG. 6 provides a graph showing the activity in conditioned media of C2C12 GAA KO myoblasts following transient transfections. FIG. 7 provides graphs showing, Panels A and B, the activity in lysates of C2C12 GAA KO myoblasts following transient transfections.

### Example 8

Identification of Active GAA Variants with Reduced Immunogenicity

[0296] In this Example, experiments conducted to characterize expression and activity of GAA variants in myoblasts as indicated herein are described.

[0297] Putative T-cell epitopes in a WT GAA of SEQ ID NO: 2 or the engineered GAA variant SEQ ID NO: 12 were identified using the Immune Epitope Database (IEDB; Immune Epitope Database and Analysis Resource website) tools, as known in the art and proprietary statistical analysis tools (See e.g., iedb.org, and Vita et al., Nucl. Acids Res., 2020, 38 (Database issue): D854-62. Epub 2009 Nov. 11). The WT GAA or the engineered GAA variant was parsed into all possible 15-mer analysis frames, with each frame overlapping the last by 14 amino acids. The 15-mer analysis frames were evaluated for immunogenic potential by scoring their predicted binding to eight common class II HLA-DR alleles (DRB1*0101, DRB1*0301, DRB1*0401, DRB1*0701, DRB1*0801, DRB1*1101, DRB1*1301, and DRB1*1501) that collectively cover 77% of the world population (See e.g., iedb.org and Bui et al., 2006, BMC Bioinformatics, 7:153), using methods recommended on the IEDB website. Potential T-cell epitope clusters contained within the enzyme (i.e., sub-regions contained within GAA which have an unusually high potential for immunogenicity) were identified using statistical analysis tools, as known in the art.

[0298] GAA variants that were identified in Example 3 to be active in assays described in Example 2 were analyzed for their levels of predicted immunogenicity by evaluating their binding to the eight common Class II HLA-DR alleles. The total immunogenicity score and immunogenic hit count were calculated for each variant. The total immunogenicity score (TIS) reflects the total number of predicted binding events between the eight MHC Class II alleles (described above) and peptide 15-mers across the sequence (i.e., a higher score indicates a higher level of predicted immunogenicity). The immunogenic “hit count” (IHC) indicates the number of peptide 15-mers that were predicted to bind to 4 or more of the 8 common alleles; these regions of the sequence have a particularly high potential for immunogenicity across a population (i.e., a higher score indicates a higher potential for immunogenicity). Mutations resulting in a reduced total immunogenicity score and/or an immunogenic hit count compared to the reference sequence were considered to be potential “deimmunizing mutations” and are shown in Table 4-1.

TABLE 4-1
Reduction of Total Immunogenicity Score
(TIS) and Immunogenic Hit Count (IHC) for GAA
Variants Relative to SEQ ID NO: 2 and SEQ ID NO: 12

| | TIC | IHC | TIC | IHC |
|---|---|---|---|---|
| SEQ | reduction | reduction | reduction | reduction |
| ID | relative | relative | relative | relative |
| NO: | to SEQ ID | to SEQ ID | to SEQ ID | to SEQ ID |
| (nt/aa) | NO: 2 | NO: 2 | NO: 12 | NO: 12 |
| 1/2 | | | | |
| 3/4 | + | + | | |
| 5/6 | ++ | +++ | | |
| 7/8 | + | ++ | | |
| 9/10 | + | ++ | | |
| 11/12 | ++ | +++ | | |
| 13/14 | ++ | +++ | ++++ | + |
| 15/16 | ++ | +++ | | |
| 17/18 | ++ | +++ | | |
| 19/20 | ++ | +++ | ++ | |
| 21/22 | ++ | +++ | | |
| 23/24 | ++ | ++ | | |
| 25/26 | ++ | +++ | + | |
| 27/28 | ++ | +++ | + | |
| 29/30 | ++ | +++ | | |
| 31/32 | ++ | ++ | | |
| 33/34 | ++ | +++ | + | |
| 35/36 | ++ | +++ | | |
| 37/38 | ++ | +++ | | |
| 39/40 | ++ | +++ | ++ | |
| 41/42 | ++ | +++ | + | |
| 43/44 | ++ | +++ | | |
| 45/46 | ++ | +++ | | |
| 47/48 | ++ | +++ | | |
| 49/50 | ++ | +++ | | |
| 51/52 | ++ | +++ | | |
| 53/54 | ++ | +++ | | |
| 55/56 | ++ | ++ | | |
| 57/58 | ++ | +++ | | |
| 59/60 | ++ | +++ | | |
| 61/62 | ++ | +++ | | |
| 63/64 | ++ | +++ | | |
| 65/66 | ++ | +++ | + | |
| 67/68 | ++ | ++ | | |
| 69/70 | ++ | +++ | | |
| 71/72 | ++ | +++ | + | |
| 73/74 | ++ | +++ | | |
| 75/76 | ++ | +++ | | |
| 77/78 | ++ | +++ | | |
| 79/80 | ++ | +++ | +++ | |
| 81/82 | ++ | +++ | | |
| 83/84 | ++ | +++ | | |
| 85/86 | ++ | +++ | | |
| 87/88 | ++ | +++ | | |
| 89/90 | ++ | +++ | ++ | |
| 91/92 | ++ | +++ | | |
| 93/94 | ++ | +++ | | |
| 95/96 | ++ | +++ | + | |
| 97/98 | ++ | +++ | | |
| 99/100 | ++ | +++ | ++ | |
| 101/102 | ++ | +++ | + | |
| 103/104 | ++ | +++ | | |
| 105/106 | ++ | +++ | | |
| 107/108 | ++ | +++ | | |
| 109/110 | ++ | +++ | | |
| 111/112 | ++ | +++ | | |
| 113/114 | ++ | +++ | | |
| 115/116 | ++ | +++ | | |
| 117/118 | ++ | +++ | | |
| 119/120 | + | ++ | | |
| 121/122 | ++ | +++ | | |
| 123/124 | ++ | +++ | | |
| 125/126 | ++ | +++ | + | |
| 127/128 | ++ | +++ | | |
| 129/130 | ++ | +++ | | |
| 131/132 | ++ | +++ | | |
| 133/134 | ++ | +++ | | |
| 135/136 | ++ | +++ | | |
| 137/138 | ++ | +++ | | |
| 139/140 | ++ | +++ | | |
| 141/142 | ++ | +++ | + | |
| 143/144 | ++ | +++ | | |
| 145/146 | ++ | +++ | | |
| 147/148 | ++ | +++ | | |
| 149/150 | ++ | ++ | | |
| 151/152 | ++ | +++ | + | |
| 153/154 | ++ | +++ | | |
| 155/156 | ++ | +++ | | |
| 157/158 | ++ | +++ | | |
| 159/160 | ++ | +++ | | |
| 161/162 | ++ | +++ | | |
| 163/164 | ++ | +++ | | |
| 165/166 | ++ | +++ | | |
| 167/168 | ++ | +++ | + | |
| 169/170 | ++ | +++ | + | |
| 171/172 | ++ | +++ | | |
| 173/174 | + | ++ | | |
| 175/176 | ++ | +++ | | |
| 177/178 | ++ | +++ | | |
| 179/180 | ++ | ++ | | |
| 181/182 | ++ | +++ | + | |
| 183/184 | ++ | +++ | | |
| 185/186 | ++ | +++ | | |
| 187/188 | ++ | +++ | | |
| 189/190 | ++ | +++ | | |
| 191/192 | ++ | +++ | | |
| 193/194 | ++ | +++ | | |
| 195/196 | ++ | +++ | | |
| 197/198 | ++ | +++ | | |
| 199/200 | ++ | +++ | | |
| 201/202 | ++ | +++ | | |
| 203/204 | ++ | +++ | | |
| 205/206 | ++ | +++ | | |
| 207/208 | ++ | +++ | | |
| 209/210 | ++ | +++ | | |
| 211/212 | ++ | +++ | | |
| 213/214 | ++ | +++ | | |
| 215/216 | ++ | +++ | | |
| 217/218 | ++ | +++ | | |
| 219/220 | ++ | +++ | | |
| 221/222 | ++ | +++ | | |
| 223/224 | ++ | +++ | | |
| 225/226 | ++ | +++ | +++ | |
| 227/228 | ++ | +++ | | |
| 229/230 | ++ | +++ | | |
| 231/232 | ++ | +++ | | |
| 233/234 | ++ | +++ | + | |
| 235/236 | ++ | +++ | | |
| 237/238 | ++ | +++ | | |
| 239/240 | ++ | +++ | | |
| 241/242 | ++ | +++ | | |
| 243/244 | ++ | +++ | | |
| 245/246 | ++ | +++ | ++ | |
| 247/248 | ++ | +++ | | |
| 249/250 | ++ | +++ | + | |
| 251/252 | ++ | +++ | + | |
| 253/254 | ++ | +++ | | |
| 255/256 | ++ | +++ | ++ | |
| 257/258 | ++ | +++ | | |
| 259/260 | ++ | +++ | | |
| 261/262 | ++ | +++ | | |
| 263/264 | ++ | +++ | | |
| 265/266 | ++ | +++ | + | |
| 267/268 | ++ | +++ | | |
| 269/270 | ++ | +++ | + | |
| 271/272 | ++ | +++ | | |
| 273/274 | ++ | +++ | + | |
| 275/276 | ++ | +++ | | |
| 277/278 | ++ | +++ | | |
| 279/280 | ++ | +++ | | |
| 281/282 | ++ | +++ | | |
| 283/284 | ++ | ++ | | |
| 285/286 | ++ | +++ | | |
| 287/288 | ++ | +++ | + | |
| 289/290 | ++ | +++ | | |
| 291/292 | ++ | +++ | | |
| 293/294 | ++ | +++ | | |
| 295/296 | ++ | +++ | | |
| 297/298 | ++ | +++ | | |
| 299/300 | ++ | +++ | | |
| 301/302 | ++ | +++ | | |
| 303/304 | ++ | +++ | +++ | |
| 305/306 | ++ | +++ | | |
| 307/308 | ++ | +++ | | |
| 309/310 | ++ | +++ | +++ | |
| 311/312 | ++ | +++ | | |
| 313/314 | ++ | +++ | | |
| 315/316 | ++ | +++ | + | |
| 317/318 | ++ | +++ | | |
| 319/320 | ++ | +++ | | |
| 321/322 | ++ | +++ | | |
| 323/324 | ++ | +++ | ++ | |
| 325/326 | ++ | +++ | | |
| 327/328 | ++ | +++ | | |
| 329/330 | ++ | +++ | +++ | + |
| 331/332 | ++ | +++ | | |
| 333/334 | ++ | ++ | | |
| 335/336 | ++ | +++ | | |
| 337/338 | ++ | +++ | | |
| 339/340 | ++ | +++ | | |
| 341/342 | ++ | +++ | | |
| 343/344 | ++ | +++ | +++ | |
| 345/346 | ++ | +++ | | |
| 347/348 | ++ | +++ | | |
| 349/350 | ++ | ++ | | |
| 351/352 | ++ | +++ | + | |
| 353/354 | ++ | +++ | | |
| 355/356 | ++ | +++ | | |
| 357/358 | ++ | +++ | | |
| 359/360 | ++ | +++ | | |
| 361/362 | ++ | +++ | | |
| 363/364 | ++ | +++ | | |
| 365/366 | ++ | +++ | | |
| 367/368 | ++ | +++ | | |
| 369/370 | ++ | +++ | | |
| 371/372 | ++ | ++ | | |
| 373/374 | ++ | +++ | | |
| 375/376 | ++ | +++ | ++++ | +++ |
| 377/378 | ++ | +++ | +++ | |
| 379/380 | ++ | +++ | + | |
| 381/382 | ++ | +++ | | |
| 383/384 | ++ | +++ | | |
| 385/386 | ++ | +++ | | |
| 387/388 | ++ | +++ | | |
| 389/390 | ++ | +++ | | |
| 391/392 | ++ | +++ | + | |
| 393/394 | ++ | +++ | + | |
| 395/396 | ++ | +++ | | |
| 397/398 | ++ | +++ | + | |
| 399/400 | ++ | +++ | | |
| 401/402 | ++ | +++ | | |
| 403/404 | ++ | +++ | | |
| 405/406 | + | ++ | | |
| 407/408 | ++ | +++ | | |
| 409/410 | ++ | +++ | | |
| 411/412 | ++ | +++ | + | |
| 413/414 | ++ | +++ | | |
| 415/416 | ++ | +++ | | |
| 417/418 | ++ | +++ | | |
| 419/420 | ++ | +++ | ++ | |
| 421/422 | ++ | +++ | | |
| 423/424 | ++ | +++ | | |
| 425/426 | ++ | +++ | | |
| 427/428 | ++ | +++ | | |
| 429/430 | ++ | +++ | | |
| 431/432 | ++ | +++ | + | |
| 433/434 | ++ | +++ | +++ | + |
| 435/436 | ++ | +++ | | |
| 437/438 | ++ | +++ | | |
| 439/440 | ++ | +++ | | |
| 441/442 | ++ | +++ | | |
| 443/444 | ++ | +++ | | |
| 445/446 | ++ | +++ | + | |
| 447/448 | ++ | +++ | + | |
| 449/450 | ++ | +++ | ++++ | + |
| 451/452 | ++ | +++ | | |
| 453/454 | ++ | +++ | | |
| 455/456 | ++ | +++ | ++ | |
| 457/458 | ++ | +++ | | |
| 459/460 | ++ | +++ | | |
| 461/462 | ++ | +++ | + | |
| 463/464 | ++ | +++ | | |
| 465/466 | ++ | +++ | + | |
| 467/468 | ++ | +++ | | |
| 469/470 | ++ | +++ | | |
| 471/472 | ++ | +++ | | |
| 473/474 | + | ++ | | |
| 475/476 | ++ | +++ | | |
| 477/478 | ++ | +++ | + | |
| 479/480 | ++ | +++ | | |
| 481/482 | ++ | +++ | + | |
| 483/484 | ++ | +++ | | |
| 485/486 | ++ | +++ | | |
| 487/488 | ++ | +++ | + | |
| 489/490 | ++ | +++ | | |
| 491/492 | ++ | +++ | | |
| 493/494 | ++ | +++ | + | |
| 495/496 | ++ | +++ | | |
| 497/498 | ++ | +++ | | |
| 499/500 | ++ | +++ | | |
| 501/502 | ++ | +++ | | |
| 503/504 | ++ | +++ | + | |
| 505/506 | ++ | +++ | | |
| 507/508 | ++ | +++ | | |
| 509/510 | ++ | +++ | | |
| 511/512 | ++ | +++ | | |
| 513/514 | ++ | +++ | | |
| 515/516 | ++ | +++ | | |
| 517/518 | ++ | +++ | + | |
| 519/520 | ++ | +++ | | |
| 521/522 | ++ | +++ | | |
| 523/524 | ++ | ++ | | |
| 525/526 | ++ | +++ | + | |
| 527/528 | ++ | +++ | ++ | |
| 529/530 | ++ | +++ | | |
| 531/532 | ++ | +++ | + | |
| 533/534 | ++ | +++ | + | |
| 535/536 | ++ | +++ | + | |
| 537/538 | ++ | +++ | +++ | |
| 539/540 | + | ++ | | |
| 541/542 | ++ | +++ | | |
| 543/544 | ++ | +++ | + | |
| 545/546 | ++ | +++ | | |
| 547/548 | ++ | +++ | | |
| 549/550 | ++ | +++ | | |
| 551/552 | ++ | +++ | | |
| 553/554 | ++ | +++ | + | |
| 555/556 | ++ | +++ | | |
| 557/558 | ++ | +++ | ++ | |
| 559/560 | ++ | +++ | ++++ | + |
| 561/562 | ++ | +++ | | |
| 563/564 | ++ | +++ | | |
| 565/566 | ++ | +++ | | |
| 567/568 | ++ | ++ | | |
| 569/570 | ++ | +++ | | |
| 571/572 | ++ | +++ | | |
| 573/574 | ++ | +++ | + | |
| 575/576 | ++ | +++ | | |
| 577/578 | ++ | +++ | | |
| 579/580 | ++ | +++ | + | |
| 581/582 | ++ | +++ | ++ | |
| 583/584 | ++ | +++ | ++ | |
| 585/586 | ++ | +++ | | |
| 587/588 | ++ | ++ | | |
| 589/590 | ++ | +++ | | |
| 591/592 | ++ | +++ | | |
| 593/594 | ++ | ++ | | |
| 595/596 | ++ | +++ | | |
| 597/598 | ++ | +++ | ++ | |
| 599/600 | ++ | +++ | + | |
| 601/602 | ++ | +++ | | |
| 603/604 | ++ | +++ | | |
| 605/606 | ++ | +++ | | |
| 607/608 | ++ | +++ | | |
| 609/610 | ++ | +++ | | |
| 611/612 | ++ | +++ | | |
| 613/614 | ++ | +++ | | + |
| 615/616 | ++ | +++ | + | |
| 617/618 | ++ | ++ | | |
| 619/620 | ++ | +++ | | |
| 621/622 | ++ | +++ | | |
| 623/624 | ++ | +++ | + | |
| 625/626 | ++ | +++ | | |
| 627/628 | ++ | ++ | | |
| 629/630 | ++ | +++ | + | |
| 631/632 | ++ | +++ | | |
| 633/634 | ++ | +++ | | |
| 635/636 | ++ | +++ | | |
| 637/638 | ++ | +++ | ++++ | ++ |
| 639/640 | ++ | +++ | + | |
| 641/642 | ++ | +++ | + | |
| 643/644 | ++ | +++ | | |
| 645/646 | ++ | +++ | | |
| 647/648 | ++ | +++ | | |
| 649/650 | ++ | ++ | | |
| 651/652 | ++ | +++ | ++ | |
| 653/654 | ++ | +++ | +++ | |
| 655/656 | ++ | +++ | | |
| 657/658 | ++ | ++ | | |
| 659/660 | ++ | +++ | | |
| 661/662 | ++ | +++ | + | |
| 663/664 | + | ++ | | |
| 665/666 | ++ | +++ | | |
| 667/668 | ++ | +++ | + | |
| 669/670 | ++ | +++ | | |
| 671/672 | ++ | +++ | +++ | |
| 673/674 | ++ | +++ | | |
| 675/676 | ++ | +++ | | |
| 677/678 | ++ | +++ | | |
| 679/680 | ++ | +++ | | |
| 681/682 | ++ | +++ | | |
| 683/684 | ++ | +++ | | |
| 685/686 | ++ | +++ | | |
| 687/688 | ++ | +++ | | |
| 689/690 | ++ | +++ | | |
| 691/692 | ++ | +++ | | |
| 693/694 | ++ | +++ | | |
| 695/696 | ++ | +++ | | |
| 697/698 | ++ | +++ | | |
| 699/700 | ++ | +++ | | |
| 701/702 | ++ | +++ | | |
| 703/704 | ++ | +++ | +++ | + |
| 705/706 | ++ | +++ | | |
| 707/708 | ++ | +++ | | |
| 709/710 | ++ | ++ | | |
| 711/712 | ++ | +++ | | |
| 713/714 | ++ | +++ | | |
| 715/716 | ++ | ++ | | |
| 717/718 | ++ | +++ | + | |
| 719/720 | ++ | +++ | | |
| 721/722 | ++ | +++ | | |
| 723/724 | ++ | +++ | | |
| 725/726 | ++ | +++ | + | |
| 727/728 | ++ | +++ | + | + |
| 729/730 | ++ | +++ | | |
| 731/732 | ++ | +++ | + | ++ |
| 733/734 | ++ | +++ | + | |
| 735/736 | ++ | +++ | + | |
| 737/738 | ++ | +++ | ++ | |
| 739/740 | ++ | ++ | | |
| 741/742 | ++ | +++ | | |
| 743/744 | ++ | +++ | | |
| 745/746 | ++ | +++ | + | |
| 747/748 | ++ | +++ | ++ | |
| 749/750 | ++ | ++ | | |
| 751/752 | ++ | +++ | | |
| 753/754 | ++ | +++ | +++ | |

TIS reduction was measured as a reduction in the number of counts compared to the reference polypeptide of SEQ ID NO: 2 or SEQ ID NO: 12 and is defined as follows: “+” 1-10, “++” >10, “+++” >100, “++++” >200.
IHC reduction was measured as a reduction in the number of counts compared to the reference polypeptide of SEQ ID NO: 2 or SEQ ID NO: 12 and is defined as follows: “+” 1-2, “++” >2, “+++” >5, “++++” >20

### Example 9

### Characterization of GAA Variants in an Ex Vivo Immunogenicity Assessment

[0299] MHC II associated peptide proteomics (MAPPs) assays can be used to provide experimental evidence of HLA-binding epitopes from a protein antigen. The MAPPs assay combines the major steps of antigen uptake into differentiated antigen presenting cells, lysosomal processing, HLA binding, and presentation at the cell surface of an antigen presenting cell. The naturally processed, binding, and displayed peptides are then identified and quantified by liquid chromatography-mass spectrometry. Presentation of peptides at the cell surface by HLA-DR receptors to CD4+T helper cells is a required step in the activation cascade that includes T cell proliferation, differentiation, and ultimate production of antibodies from B cells. Therefore, decreased binding of a processed antigen to the groove of MHC II molecules and subsequent decreased presentation of an antigen is considered to reduce the immunogenicity risk potential of an antigen.

[0300] In this example, peripheral blood mononuclear cells (PBMCs) from healthy donor buffy coats were separated to isolate CD14+ monocytes which were subsequently differentiated into dendritic cells (DC) by methods known in the art. The DCs were then incubated with GAA variants and induced to a mature phenotype via addition of lipopolysaccharide. The HLA-DR binding peptides arising from processed antigens (GAA and variants) were captured by immunoprecipitation and eluted for LC-MS analysis. Identified binding peptides were aligned to the amino acid sequences of the GAA variants to enable comparison of processing and abundance of peptides originating from each GAA variant (Kropshofer and Spindeldreher (2005) in Antigen Presenting Cells:From Mechanisms to Drug Development, eds. Kropshofer and Vogt, Wiley-VCH, Weinheim, 159-98). By comparing the identified peptides, the GAA variants of SEQ ID NO: 6, SEQ ID NO: 8, and SEQ ID NO: 14 experimentally have significantly reduced processing and reduced frequency of peptide presentation as compared to the SEQ ID NO: 2 (see FIG. 8).

[0301] While the invention has been described with reference to the specific embodiments, various changes can be made and equivalents can be substituted to adapt to a particular situation, material, composition of matter, process, process step or steps, thereby achieving benefits of the invention without departing from the scope of what is claimed.

[0302] All publications, patents, patent applications and other documents cited in this application are hereby incorporated by reference in their entireties for all purposes to the same extent as if each individual publication, patent, patent application or other document were individually indicated to be incorporated by reference for all purposes.

What is claimed is:

1. An engineered acid alpha-glucosidase, or biologically active fragment thereof, comprising an amino acid sequence having at least 80%, 81%, 82%, 83%, 84%, 85%, 86%, 87%, 88%, 89%, 90%, 91%, 92%, 93%, 94%, 95%, 96%, 97%, 98%, or 99%, or more sequence identity to a reference sequence corresponding to residues 20 to 944 of SEQ ID NO: 12, or to a reference sequence corresponding to SEQ ID NO: 12, wherein the amino acid sequence comprises at least a substitution or amino acid residue 305V, 24A/C/D/F/G/H/I/K/M/N/P/S/T/V/Y, 28A/C/D/E/F/G/H/K/Q/T/V/W, 29A/C/D/E/F/G/H/I/K/M/N/P/R/W/Y, 39A/E/F/G/I/L/N/T, 50A/C/D/E/F/H/I/K/M/N/R/S/T/W/Y, 62D/H/I/K/M/N/P/Q/Y, 78A/C/D/F/G/H/I/K/L/M/N/Q/R/S/T/V/W/Y, 87A/G/H/I/K/L/MN/Q/R/S/T/V/W, 135C/D/E/F/G/H/I/K/L/N/R/Y, 266A/D/E/H/K/Q, 267H/L/T/V, 437A/H, 486C/D/F/G/H/I/K/L/M/N/Q/R/S/V/W/Y, 522A/C/D/F/G/H/I/K/L/M/N/P/Q/R/S/T/W/Y, 569A/C/D/E/G/K/M/N/P/R/W, 670A/D/G/H/K/M/Y, 692A/D/E/H/K/L/M/N/T/W, 711D/E/I/K/M/N/Q/S/T/V/Y, 736F/L, 750E/K/L/Q/R, 812A/D/G/S, 830D/E/F/G/H/L/M/N/S/T/W/Y, 842A/C/D/F/H/K/L/M/N/Q/R/T/W, 871A/C/D/F/H/I/M/N/Q/T/V/W/Y, 883A/F/Q, 894A/D/E/H/I/K/L/M/N/S/T/V/W/Y, 913F/I/K/M/N/S, or 932C/D/E/G/H/K/L/M/N/P/Q/R/W/Y, or combinations thereof, wherein the amino acid positions are relative to the reference sequence corresponding to residues 20 to 944 of SEQ ID NO: 12 or 2, or to a reference sequence corresponding to SEQ ID NO: 12 or 2.

2. An engineered acid alpha-glucosidase, or biologically active fragment thereof, comprising an amino acid sequence having at least 80%, 81%, 82%, 83%, 84%, 85%, 86%, 87%, 88%, 89%, 90%, 91%, 92%, 93%, 94%, 95%, 96%, 97%, 98%, or 99% or more sequence identity to a reference sequence corresponding to residues 20-944 of an even numbered SEQ ID NO. of SEQ ID NOs: 14-754, or to an even numbered SEQ ID NO. of SEQ ID NOs: 14-754, wherein the amino acid sequence comprises at least a substitution or amino acid residue 305V, 24A/C/D/F/G/H/I/K/M/N/P/S/T/V/Y, 28A/C/D/E/F/G/H/K/Q/T/V/W, 29A/C/D/E/F/G/H/I/K/M/N/P/R/W/Y, 39A/E/F/G/I/L/N/T, 50A/C/D/E/F/H/I/K/M/N/R/S/T/W/Y, 62D/H/I/K/M/N/P/Q/Y, 78A/C/D/F/G/H/I/K/L/M/N/Q/R/S/T/V/W/Y, 87A/G/H/I/K/L/MN/Q/R/S/T/V/W, 135C/D/E/F/G/H/I/K/L/N/R/Y, 266A/D/E/H/K/Q, 267H/L/T/V, 437A/H, 486C/D/F/G/H/I/K/L/M/N/Q/R/S/V/W/Y, 522A/C/D/F/G/H/I/K/L/M/N/P/Q/R/S/T/W/Y, 569A/C/D/E/G/K/M/N/P/R/W, 670A/D/G/H/K/M/Y, 692A/D/E/H/K/L/M/N/T/W, 711D/E/I/K/M/N/Q/S/T/V/Y, 736F/L, 750E/K/L/Q/R, 812A/D/G/S, 830D/E/F/G/H/L/M/N/S/T/W/Y, 842A/C/D/F/H/K/L/M/N/Q/R/T/W, 871A/C/D/F/H/I/M/N/Q/T/V/W/Y, 883A/F/Q, 894A/D/E/H/I/K/L/M/N/S/T/V/W/Y, 913F/I/K/M/N/S, or 932C/D/E/G/H/K/L/M/N/P/Q/R/W/Y, or combinations thereof, wherein the amino acid positions are relative to the reference sequence corresponding to residues 20 to 944 of SEQ ID NO: 2, or to a reference sequence corresponding to SEQ ID NO: 2.

3. The engineered acid alpha-glucosidase of claim 1, wherein the amino acid sequence of the engineered acid alpha-glucosidase comprises residues 20 to 944 of an even-numbered SEQ ID NO. of SEQ ID NOs: 14-754, or comprises an even-numbered SEQ ID NO. of SEQ ID NOs: 14-754.

4. The engineered acid alpha-glucosidase of claim 1, wherein the amino acid sequence of the engineered acid alpha-glucosidase comprises residues 20 to 944 of SEQ ID NO: 14, 114, 126, 170, 250, 252, 394, 472, 488, or 506, or comprises SEQ ID NO: 14, 114, 126, 170, 250, 252, 394, 472, 488, or 506.

5. The engineered acid alpha-glucosidase of claim 1, wherein the engineered acid alpha-glucosidase exhibits at least one improved property selected from: i) enhanced catalytic activity; ii) increased tolerance to pH 7; iii) increased tolerance to pH 4.4; iv) increased stability in lysosomes; v) increased expression in cells; vi) increased uptake into cells; vii) increased enzymatic activity in cell lysates; viii) increased stability in plasma/serum; and ix) reduced immunogenicity; or a combination of any of i), ii), iii), iv), v), vi), vii), viii), and ix), as compared to a reference acid alpha-glucosidase having a sequence corresponding to residues 20 to 944 of SEQ ID NO: 2 or 12, or a sequence corresponding to SEQ ID NO: 2 or 12.

6. The engineered acid alpha-glucosidase of claim 5, wherein the engineered acid alpha-glucosidase exhibits reduced immunogenicity as compared to the reference acid alpha-glucosidase having a sequence corresponding to residues 20 to 944 of SEQ ID NO: 2 or 12, or a sequence corresponding to SEQ ID NO: 2 or 12.

7. The engineered acid alpha-glucosidase of claim 6, wherein the engineered acid alpha-glucosidase exhibits (a) a reduction in Total Immunogenic Score (TIS) of greater than 10 as compared to the reference acid alpha-glucosidase of SEQ ID NO: 2; (b) a reduction in Immunogenic Hit Count (IHC) of greater than 2 as compared to the reference acid alpha-glucosidase of SEQ ID NO: 2; (c) a reduction in Total Immunogenic Score (TIS) of greater than 10 as compared to the reference acid alpha-glucosidase of SEQ ID NO: 12; and/or (d) a reduction in Immunogenic Hit Count (IHC) of greater than 2 as compared to the reference acid alpha-glucosidase of SEQ ID NO: 12.

8. The engineered acid alpha-glucosidase of claim 1, comprising a pre-pro-peptide of the engineered acid alpha-glucosidase.

9. The engineered acid alpha-glucosidase of a claim 8, wherein the pre-pro-peptide of the engineered acid alpha-glucosidase comprises a eukaryotic or synthetic signal peptide sequence.

10. The engineered acid alpha-glucosidase of claim 9, wherein the signal peptide comprises a mouse or human signal peptide sequence.

11. The engineered acid alpha-glucosidase of claim 1, comprising a pro-peptide of the engineered acid alpha-glucosidase.

12. The engineered acid alpha-glucosidase of claim 1, wherein the engineered acid alpha-glucosidase is purified.

13. A pharmaceutical composition comprising an engineered acid alpha-glucosidase of claim 1.

14. The pharmaceutical composition of claim 13, further comprising a pharmaceutically acceptable carrier and/or excipient.

15. The pharmaceutical composition of claim 13, wherein the composition is suitable for parenteral injection or infusion to a human.

16. A recombinant polynucleotide comprising a polynucleotide sequence encoding an engineered acid alpha-glucosidase of claim 1.

17. The recombinant polynucleotide of claim 16, comprising a polynucleotide sequence having at least 70%, 75%, 80%, 81%, 82%, 83%, 84%, 85%, 86%, 87%, 88%, 89%, 90%, 91%, 92%, 93%, 94%, 95%, 96%, 97%, 98%, or 99% or more sequence identity to a reference polynucleotide sequence corresponding to nucleotide residues 58-2832 of an odd-numbered SEQ ID NO. of SEQ ID NOs: 13-753, or to a reference polynucleotide sequence corresponding to an odd-numbered SEQ ID NO. of SEQ ID NOs: 13-753, wherein the polynucleotide encodes an acid alpha-glucosidase.

18. The recombinant polynucleotide of claim 16, comprising a polynucleotide sequence codon-optimized for expression of the encoded engineered acid alpha-glucosidase.

19. The recombinant polynucleotide of claim 16, comprising a polynucleotide sequence comprising nucleotide residues 58-2832 of an odd-numbered SEQ ID NO. of SEQ ID NOs: 13-753, or a polynucleotide sequence comprising an odd-numbered SEQ ID NO. of SEQ ID NOs: 13-753.

20. The recombinant polynucleotide of claim 16, comprising a polynucleotide sequence comprising nucleotide residues 58-2832 of SEQ ID NO: 13, 113, 125, 169, 249, 251, 393, 471, 487, or 505, or a polynucleotide sequence comprising SEQ ID NO: 13, 113, 125, 169, 249, 251, 393, 471, 487, or 505.

21. An expression vector comprising the recombinant polynucleotide of claim 16.

22. The expression vector of claim 21, wherein the recombinant polynucleotide is operably linked to a control sequence.

23. The expression vector of claim 22, wherein the control sequence comprises a promoter.

24. The expression vector of claim 23, wherein the promoter is a heterologous promoter.

25. A host cell comprising the expression vector of claim 21.

26. The host cell of claim 25, wherein the host cell is a eukaryotic cell or prokaryotic cell.

27. The host cell of claim 25, wherein the host cell is a mammalian cell.

28. The host cell of claim 27, wherein the mammalian cell is a human cell.

29. The host cell of claim 28, wherein the human cell is from a patient having a deficiency in acid alpha-glucosidase activity.

30. A method of producing an engineered acid alpha-glucosidase variant, comprising culturing the host cell of claim 25 under suitable conditions such that the acid alpha-glucosidase encoded by the recombinant polynucleotide is produced.

31. The method of claim 30, further comprising the step of recovering the acid alpha-glucosidase.

32. The method of claim 30, further comprising purifying the acid alpha-glucosidase.

33. A method for treating and/or preventing symptoms of a deficiency in acid alpha-glucosidase in a subject, comprising administering to a subject in need thereof an effective amount of an engineered acid alpha-glucosidase of claim 1.

34. The method of claim 33, wherein the deficiency in acid alpha-glucosidase is Pompe disease.

35. The method of claim 34, wherein the subject is an infant or child.

36. The method of claim 34, wherein the subject is an adult or young adult.

The application's sequence listing, which the Patent Office published only in electronic form, follows.

SEQUENCE LISTING (754 sequences)

SEQ ID NO: 1 - DNA, 2832 bp, synthetic construct
  misc_feature 1..2832: note = Homo Sapiens Lysosomal alpha-glucosidase
  source 1..2832: mol_type = other DNA
atggaatggagctgggtctttctcttcttcctgtcagtaacgactggtgtccactccggacacattctgctgcatgattttctcctggtgcctagagagctttccggttcaagtcccgtcctcgaagaaacacatccagcccatcagcagggcgcatctaggccgggccctcgggacgctcaagctcacccagggagacctagggccgttcccactcagtgcgacgtgccaccaaactcacgcttcgattgtgcacctgacaaggccatcacgcaagagcagtgcgaggcccgcggatgttgttacataccggctaaacaggggttgcagggtgcgcagatgggccaaccttggtgcttcttcccaccatcctatccgagttacaagctggagaatctctccagctctgaaatgggatataccgcaacactgactcggaccacccccacattctttcccaaagatatcttgactctgagacttgacgtaatgatggagacagaaaacaggctccactttaccattaaggaccctgccaatcgccgatacgaggtgcctctggaaacaccacacgtgcacagtagagctccatcacctctgtattctgtcgagttctccgaagagccgtttggcgttatcgtcaggaggcagctcgacgggcgagtgcttctgaacacgactgtggccccgttgttctttgcggatcagtttctgcaactgtcaacaagtctcccttctcagtacattaccgggcttgcagagcatctgtccccactcatgctgagtacttcatggacccgcatcacactgtggaatagagaccttgctcctactccaggagccaacttgtatggttctcaccctttctacttggccctggaagatggcggatcagcgcatggcgtattcctcctgaattccaacgcaatggacgttgttcttcagccatctcctgctttgagttggagatctacaggcgggatactggacgtctacatctttctgggtccagagcctaaatccgtagtgcagcagtatcttgatgtcgtcggatacccgtttatgccaccatattggggcctggggttccacttgtgccgctggggatattcatccaccgccattacacgacaagttgttgagaatatgaccagggcacattttcctctggatgtacagtggaacgacctggactacatggatagtcgccgcgacttcaccttcaataaggatgggttcagagactttcctgctatggtccaagaacttcaccagggaggcaggaggtacatgatgatcgtagatccggccatttcttcttctggcccagccggttcatacagaccgtatgacgaaggactgcgacgaggcgtctttatcacgaacgagactggtcagcctttgataggcaaggtttggccagggtccaccgctttcccggatttcacaaatcctacagcactggcctggtgggaagatatggtcgccgagtttcacgaccaggtcccatttgacgggatgtggatcgacatgaacgagccatccaacttcattagaggaagtgaagatggctgtccgaataatgagctggaaaaccctccttacgtaccaggcgttgttggtgggactcttcaagctgcgacgatttgcgcatcctcccatcagttcctgtcaacccactataacttgcacaatctgtacgggcttacagaggctatcgccagtcatagggccctggtaaaagctagaggaacacgccctttcgtcatctctcgctcaacttttgcaggccacggtaggtatgccggacattggaccggcgacgtctggagtagttgggaacagctggcttcctccgttccagagatattgcagtttaacctgttgggagtcccacttgtaggtgcagatgtttgtggcttcctggggaacacctcagaagaattgtgcgtaagatggactcaactgggcgccttctacccttttatgcgcaatcacaactcactgctgtctttgcctcaagaaccgtactcttttagtgagccagcacagcaggccatgaggaaggctcttacactgagatatgcacttctgccgcatctgtacacccttttccaccaggctcatgtcgcgggagagactgttgcacgacctctgttcttggagttcccaaaagactcctccacgtggacagtcgatcaccagcttctgtggggcgaggctctgctgattacacctgtattgcaagctggtaaggccgaagttaccgggtactttccattggggacctggtatgatctgcaaacagtcccggttgaagctcttggaagtcttccacctccacctgctgcaccaagggagcctgcgatccactctgaaggacagtgggtaactttgcctgcaccgctggacaccatcaatgtccatctgcgcgcgggctacatcataccacttcaaggtcctggactgaccactacagagtctagacaacaaccaatggctcttgctgttgcactgactaaaggcggcgaagcaaggggtgagctgttctgggacgacggagagtcactggaggtattggaacgaggcgcgtatacgcaggtcatttttctggctcgcaataatacgatcgttaacgagctggtccgcgtcacttcagaaggtgcaggccttcagttgcagaaggtaactgtcctgggagttgctacagcaccgcagcaggtcttgtccaacggagtcccggtatccaactttacctatagtccagataccaaagttctggacatctgcgtttctctgctgatgggtgagcagttcctggtatcatggtgc

SEQ ID NO: 2 - protein, 944 aa, synthetic construct
  REGION 1..944: note = Homo Sapiens Lysosomal alpha-glucosidase
MEWSWVFLFFLSVTTGVHSGHILLHDFLLVPRELSGSSPVLEETHPAHQQGASRPGPRDAQAHPGRPRAVPTQCDVPPNSRFDCAPDKAITQEQCEARGCCYIPAKQGLQGAQMGQPWCFFPPSYPSYKLENLSSSEMGYTATLTRTTPTFFPKDILTLRLDVMMETENRLHFTIKDPANRRYEVPLETPHVHSRAPSPLYSVEFSEEPFGVIVRRQLDGRVLLNTTVAPLFFADQFLQLSTSLPSQYITGLAEHLSPLMLSTSWTRITLWNRDLAPTPGANLYGSHPFYLALEDGGSAHGVFLLNSNAMDVVLQPSPALSWRSTGGILDVYIFLGPEPKSVVQQYLDVVGYPFMPPYWGLGFHLCRWGYSSTAITRQVVENMTRAHFPLDVQWNDLDYMDSRRDFTFNKDGFRDFPAMVQELHQGGRRYMMIVDPAISSSGPAGSYRPYDEGLRRGVFITNETGQPLIGKVWPGSTAFPDFTNPTALAWWEDMVAEFHDQVPFDGMWIDMNEPSNFIRGSEDGCPNNELENPPYVPGVVGGTLQAATICASSHQFLSTHYNLHNLYGLTEAIASHRALVKARGTRPFVISRSTFAGHGRYAGHWTGDVWSSWEQLASSVPEILQFNLLGVPLVGADVCGFLGNTSEELCVRWTQLGAFYPFMRNHNSLLSLPQEPYSFSEPAQQAMRKALTLRYALLPHLYTLFHQAHVAGETVARPLFLEFPKDSSTWTVDHQLLWGEALLITPVLQAGKAEVTGYFPLGTWYDLQTVPVEALGSLPPPPAAPREPAIHSEGQWVTLPAPLDTINVHLRAGYIIPLQGPGLTTTESRQQPMALAVALTKGGEARGELFWDDGESLEVLERGAYTQVIFLARNNTIVNELVRVTSEGAGLQLQKVTVLGVATAPQQVLSNGVPVSNFTYSPDTKVLDICVSLLMGEQFLVSWC

SEQ ID NO: 3 - DNA, 2832 bp, synthetic construct
  misc_feature 1..2832: note = Variant of the Homo Sapiens Lysosomal alpha-glucosidase
  source 1..2832: mol_type = other DNA
atggaatggagctgggtctttctcttcttcctgtcagtaacgactggtgtccactccggacacatactgtggcatgatttttctaccgtgcctagagagctttccggttcaagtcaagtcctcgaagaaacacatccagcccatcaggttggcgcatctaggccgggccctcgggacgctcaactccacccagggagacctagggccgttcccactcagtgcgacgtgccaccaaactcacgcttcgattgtgcacctgacaaggccatcacgcaagagcagtgcgaggcccgcggatgttgttacataccggctaaacaggggctccagggtgcgcagatgggccaaccttggtgcttcttcccaccatcctatccgagttacaagctggagaatctctcccagtctgaaatgggatataccgcaacactgactcggaccaccccctccttctttcccaaagatatcttgactctgagacttgacgtaatgatggagacagaaaacaggctccactttaccattaaggaccctgccaatcgccgatacgaggtgcctctggaaacaccacacgtgcacagtagagctccatcacctctgtattctgtcgagttctccgaagagccgtttggcgttatcgtcaggaggcagctcgacgggcgagtgcttctgaacacgactgtggccccgttgttctttgcggatcagtttctgcaactgtcaacaagtctcccttctcagtacattaccgggcttgcagagcatctgtccccactcatgctgagtacttcatggaccaaaatcacactgtggaatagagaccttgctcctactccaggagccaacttgtatggttctcaccctttctacttggccctggaagatggcggatcagcgcatggcgtattcctcctgaattccaacgcaatggacgttgttcttcagccatctcctgctttgagttggagatctacaggcgggatactggacgtctacatctttctgggtccagagcctaaatccgtagtgcagcagtatcttgatgtcgtcggatacccgtttatgccaccatattggggcctggggttccacttgtgccgctggggatattcatccaccgccattacacgacaagttgttgagaatatgaccagggcacattttcctctggatgtacagtggaacgacctggactacatggatagtcgccgcgacttcaccttcaataaggatgggttcagagactttcctgctatggtccaagaacttcaccagggaggcaggaggtacatgatgatcgtagatccgggaatttcttcttctggcccagccggttcatacagaccgtatgacgaaggactgcgacgaggcgtctttatcacgaacgagactggtcagcctttgataggcaaggtttggccagggtccaccgctttcccggatttcacaaatcctgaggcactggcctggtgggaagatatggtcgccgagtttcacgaccaggtcccatttgacgggatgtggatcgacatgaacgagccatccaacttcattagaggaagtgtggatggctgtccgcggaatgagctggaaaaccctccttacgtaccaggcgttgttggtgggactcttcaagctgcgacgatttgcgcatcctcccatcagttcctgtcaacccactataacttgcacaatctgtacgggcttacagaggctatcgccagtcatagggccctggtaaaagctagaggaacacgccctttcgtcatctctcgctcaacttttgcaggccacggtaggtatgccggacattggaccggcgacgtctggagttcttgggaacagctggcttcctccgttccagagatattgcagtttaacctgttgggagtcccacttgtaggtgcagatgtttgtggcttcctggggaacacctcagaagaattgtgcgtaagatggactcaactgggcgccttctacccttttatgcgcaatcacaactcactgctgtctttgcctcaagaaccgtactcttttagtgagccagcacagcaggccatgaggaaggctcttacactgagatatgcacttctgccgcatctgtacacccttttccaccaggctcatgtcgcgggagagactgttgcacgacctctgttcttggagttcccaaaagactggtccacgtggacagtcgatcaccagcttctgtggggcgaggctctgctgattacacctgtattgcaacctggtaaggccgaagttaccgggtactttccattggggacctggtatgatctgcaaacagtcccggttgaagctcttggaagtcttccacctccacctgctgcaccaagggagcctgcgatccactctgaaggacagtgggtaactttgcctgcaccgctggacaccatcaatgtccatctgcgcgcgggctacatcataccacttcaaggtcctggactgaccactacagagtctagaaaacaaccaatggctcttgctgttgcactgactaaaagcggcgaagcaaggggtgagctgttctgggacgacggagagtcactggaggtattggaacgaggcgcgtatacgcaggtcatttttctggctcgcaataatacgatcgttaacgagctggtccacgtcacttcagaaggtgcaggccttcagttgggcaaggtaactgtcctgggagttgctacagcaccgcagcaggtcttgtccaacggacggcccgtaagcaactttacctatagtcctgataccaaagttctggacatctgcgttgctctgctgatgggtgagcagttcctggtatcatggtgc

SEQ ID NO: 4 - protein, 944 aa, synthetic construct
  REGION 1..944: note = Variant of the Homo Sapiens Lysosomal alpha-glucosidase
MEWSWVFLFFLSVTTGVHSGHILWHDFSTVPRELSGSSQVLEETHPAHQVGASRPGPRDAQLHPGRPRAVPTQCDVPPNSRFDCAPDKAITQEQCEARGCCYIPAKQGLQGAQMGQPWCFFPPSYPSYKLENLSQSEMGYTATLTRTTPSFFPKDILTLRLDVMMETENRLHFTIKDPANRRYEVPLETPHVHSRAPSPLYSVEFSEEPFGVIVRRQLDGRVLLNTTVAPLFFADQFLQLSTSLPSQYITGLAEHLSPLMLSTSWTKITLWNRDLAPTPGANLYGSHPFYLALEDGGSAHGVFLLNSNAMDVVLQPSPALSWRSTGGILDVYIFLGPEPKSVVQQYLDVVGYPFMPPYWGLGFHLCRWGYSSTAITRQVVENMTRAHFPLDVQWNDLDYMDSRRDFTFNKDGFRDFPAMVQELHQGGRRYMMIVDPGISSSGPAGSYRPYDEGLRRGVFITNETGQPLIGKVWPGSTAFPDFTNPEALAWWEDMVAEFHDQVPFDGMWIDMNEPSNFIRGSVDGCPRNELENPPYVPGVVGGTLQAATICASSHQFLSTHYNLHNLYGLTEAIASHRALVKARGTRPFVISRSTFAGHGRYAGHWTGDVWSSWEQLASSVPEILQFNLLGVPLVGADVCGFLGNTSEELCVRWTQLGAFYPFMRNHNSLLSLPQEPYSFSEPAQQAMRKALTLRYALLPHLYTLFHQAHVAGETVARPLFLEFPKDWSTWTVDHQLLWGEALLITPVLQPGKAEVTGYFPLGTWYDLQTVPVEALGSLPPPPAAPREPAIHSEGQWVTLPAPLDTINVHLRAGYIIPLQGPGLTTTESRKQPMALAVALTKSGEARGELFWDDGESLEVLERGAYTQVIFLARNNTIVNELVHVTSEGAGLQLGKVTVLGVATAPQQVLSNGRPVSNFTYSPDTKVLDICVALLMGEQFLVSWC

SEQ ID NO: 5 - DNA, 2832 bp, synthetic construct
  misc_feature 1..2832: note = Variant of the Homo Sapiens Lysosomal alpha-glucosidase
  source 1..2832: mol_type = other DNA
atggaatggagctgggtctttctcttcttcctgtcagtaacgactggtgtccactccggacacattctgtggcatgatttttctaccgtgcctagagagctttccggttcaagtcaagtcctcgaagaaacacatccagcccatcaggttggcgcatctaggccgggccctcgggacgctcaactccacccagggagacctagggccgttcccactcagtgcgacgtgccagagaactcacgcttcgattgtgcacctgagaaggctatcacgcaagagcagtgcgaggcccgcggatgttgttacataccggctaaacagggggaccagggtgcgcagatgggccaaccttggtgcttcttcccaccatcctatccgagttacaagctggagaatctctcccagtctgaaatgggatataccgcaacactgactcggaccaccccctccttctttcccaaagatatcttgactctgagacttgacgtaatgatggagacagaaaacaggctccactttaccattaaggaccctgccaatcgccgatacgaggtgcctctggaaacaccacacgtgcacagtagagctccatcacctctgtattctgtcgagttctccgaagagccgtttggcgttatcgtcaggaggcagctcgacgggcgagtgcttctgaacacgactgtggccccattgttctttgcggatcagtttctgcaactgtcaacaagtctcccttctcagtacattaccgggcttgcagagcatctgtccccactcatgctgagtacttcatggaacaaaatcacactgtggaatagagaccttgctcctactccaggagccaacttgtatggttctcaccctttctacttggccctggaagatggcggatcagcgcatggcgtattcctcctgaattccaacgcaatggacgttgttcttcagccatctcctgctttgagttggagatctacaggcgggatactggacgtctacatctttctgggtccagagcctaaatccgtagtgcagcagtatcttgatgtcgtcggatacccgtttatgccaccatattggggcctggggttccacttgtgccgctggggatattcatccaccgccattacacgacaagttgttgagaatatgaccagggcacattttcctctggatgtacagtggaacgacctggactacatggatagtcgccgcgacttcaccttcaataaggatgggttcagagactttcctgctatggtccaagaacttcaccagggaggcaggaggtacatgatgatcgtagatccgggaatttcttcttctggcccagccggttcatacagaccgtatgacgaaggactgcgacgaggcgtctttatcacgaacgagactggtcagcctttgataggcaaggtttggccagggtccaccgctttcccggatttcacaaatcctgaggcactggcctggtgggaagatatggtcgccgagtttcacgaccaggtcccatttgacgggatgtggatcgacatgaacgagccatccaacttcattagaggaagtgtggatggctgtccgagaaatgagctggaaaaccctccttacgtaccaggcgttgttggtgggactcttcaagctgcgacgatttgcgcatcctcccatcagttcctgtcaacccactataacttgcacaatctgtacgggacaacagaggctatcgccagtcatagggccctggtaaaagctagaggaacacgccctttcgttatctctcgctcaacttttgcaggccacggtaggtatgccggacattggaccggcgacgtctggagttcttgggaacagctggcttcctccgttccagagatattgcagtttaacctgttgggagtcccacttgtaggtgcagatgtttgtggcttcctggggaacacctcagaagaattgtgcgtaagatggactcaactgggcgccttctacccttttatgcgcaatcacaactcactgacatctttgcctcaagaaccgtactcatttagtgagccagcacagcaggccatgaggaaggctcttggcctgagatatgcacttctgccgcatctgtacacccttttccaccaggctcatgtccatggagagactgttgcacgacctctgttcttggagttcccaaaagactcttccacgtggacagtcgatcaccagctgctgtggggcgaggctctgctgattacacctgtattgcaacctggtaaggccgaagttaccgggtactttccattggggacctggtatgatctgcaaacagtcccggttgaagctcttggaagtcttccacctccacctgctgcaccaagggagcctgcgatccactctgaaggacagtgggtaactttgcctgcaccgctggacaccatcaatgtccatctgcgcgaaggctacatcataccacttcaaggtcctggactgaccactacagagtctagaaaacaaccaatggctcttgctgttgcactgactaaaggcggcgaagcaaggggtgagctgttctgggacgacggagagtcactggaggtattcgaacgaggcgcgtatacgcaggtcatttttgaggctcgcaataatacgatcgttaacgagctggtccacgtcacttcagaaggtgcaggccttcagttgggcaaggtaactgtcctgggagttgctacagcaccgcagcaggtcttgtccaacggaaggcccgtaagcaactttacctatagtcctgataccaaagttctggacatctgcgttgctctgctgatgggtgagcagttcctggtatcatggtgc

SEQ ID NO: 6 - protein, 944 aa, synthetic construct
  REGION 1..944: note = Variant of the Homo Sapiens Lysosomal alpha-glucosidase
MEWSWVFLFFLSVTTGVHSGHILWHDFSTVPRELSGSSQVLEETHPAHQVGASRPGPRDAQLHPGRPRAVPTQCDVPENSRFDCAPEKAITQEQCEARGCCYIPAKQGDQGAQMGQPWCFFPPSYPSYKLENLSQSEMGYTATLTRTTPSFFPKDILTLRLDVMMETENRLHFTIKDPANRRYEVPLETPHVHSRAPSPLYSVEFSEEPFGVIVRRQLDGRVLLNTTVAPLFFADQFLQLSTSLPSQYITGLAEHLSPLMLSTSWNKITLWNRDLAPTPGANLYGSHPFYLALEDGGSAHGVFLLNSNAMDVVLQPSPALSWRSTGGILDVYIFLGPEPKSVVQQYLDVVGYPFMPPYWGLGFHLCRWGYSSTAITRQVVENMTRAHFPLDVQWNDLDYMDSRRDFTFNKDGFRDFPAMVQELHQGGRRYMMIVDPGISSSGPAGSYRPYDEGLRRGVFITNETGQPLIGKVWPGSTAFPDFTNPEALAWWEDMVAEFHDQVPFDGMWIDMNEPSNFIRGSVDGCPRNELENPPYVPGVVGGTLQAATICASSHQFLSTHYNLHNLYGTTEAIASHRALVKARGTRPFVISRSTFAGHGRYAGHWTGDVWSSWEQLASSVPEILQFNLLGVPLVGADVCGFLGNTSEELCVRWTQLGAFYPFMRNHNSLTSLPQEPYSFSEPAQQAMRKALGLRYALLPHLYTLFHQAHVHGETVARPLFLEFPKDSSTWTVDHQLLWGEALLITPVLQPGKAEVTGYFPLGTWYDLQTVPVEALGSLPPPPAAPREPAIHSEGQWVTLPAPLDTINVHLREGYIIPLQGPGLTTTESRKQPMALAVALTKGGEARGELFWDDGESLEVFERGAYTQVIFEARNNTIVNELVHVTSEGAGLQLGKVTVLGVATAPQQVLSNGRPVSNFTYSPDTKVLDICVALLMGEQFLVSWC

SEQ ID NO: 7 - DNA, 2832 bp, synthetic construct
  misc_feature 1..2832: note = Variant of the Homo Sapiens Lysosomal alpha-glucosidase
  source 1..2832: mol_type = other DNA
atggaatggagctgggtctttctcttcttcctgtcagtaacgactggtgtccactccggacacatactgtggcatgatttttctaccgtgcctagagagctttccggttcaagtcaagtcctcgaagaaacacatccagcccatcaggttggcgcatctaggccgggccctcgggacgctcaagctcacccagggagacctagggccgttcccactcagtgcgacgtgccagagaactcacgcttcgattgtgcacctgagaaggccatcacgcaagagcagtgcgaggcccgcggatgttgttacataccggctaaacaggggctccagggtgcgcagatgggccaaccttggtgcttcttcccaccatcctatccgagttacaagctggagaatctctcccagtctgaaatgggatataccgcaacactgactcggaccaccccctccttctttcccaaagatatcttgactctgagacttgacgtaatgatggagacagaaaacaggctccactttaccattaaggaccctgccaatcgccgatacgaggtgcctctggaaacaccacacgtgcacagtagagctccatcacctctgtattctgtcgagttctccgaagagccgtttggcgttatcgtcaggaggcagctcgacgggcgagtgcttctgaacacgactgtggccccgttgttctttgcggatcagtttctgcaactgtcaacaagtctcccttctcagtacattaccgggcttgcagagcatctgtccccactcatgctgagtacttcatggaataaaatcacactgtggaatagagaccttgctcctactccaggagccaacttgtatggttctcaccctttctacttggccctggaagatggcggatcagcgcatggcgtattcctcctgaattccaacgcaatggacgttgttcttcagccatctcctgctttgagttggagatctacaggcgggatactggacgtctacatctttctgggtccagagcctaaatccgtagtgcagcagtatcttgatgtcgtcggatacccgtttatgccaccatattggggcctggggttccacttgtgccgctggggatattcatccaccgccattacacgacaagttgttgagaatatgaccagggcacattttcctctggatgtacagtggaacgacctggactacatggatagtcgccgcgacttcaccttcaataaggatgggttcagagactttcctgctatggtccaagaacttcaccagggaggcaggaggtacatgatgatcgtagatccggctatttcttcttctggcccagccggttcatacagaccgtatgacgaaggactgcgacgaggcgtctttatcacgaacgagactggtcagcctttgataggcaaggtttggccagggtccaccgctttcccggatttcacaaatcctgaggcactggcctggtgggaagatatggtcgccgagtttcacgaccaggtcccatttgacgggatgtggatcgacatgaacgagccatccaacttcattagaggaagtgtggatggctgtccgaggaatgagctggaaaaccctccttacgtaccaggcgttgttggtgggactcttcaagctgcgacgatttgcgcatcctcccatcagttcctgtcaacccactataacttgcacaatctgtacgggacaacagaggctatcgccagtcatagggccctggtaaaagctagaggaacacgccctttcgttatctctcgctcaacttttgcaggccacggtaggtatgccggacattggaccggcgacgtctggagttcttgggaacagctggcttcctccgttccagagatattgcagtttaacctgttgggagtcccacttgtaggtgcagatgtttgtggcttcctggggaacacctcagaagaattgtgcgtaagatggactcaactgggcgccttctacccttttatgcgcaatcacaactcactgacatctttgcctcaagaaccgtacagctttagtgagccagcacagcaggccatgaggaaggctcttacactgagatatgcacttctgccgcatctgtacacccttttccaccaggctcatgtccacggagagactgttgcacgacctctgttcttggagttcccaaaagactcttccacgtggacagtcgatcaccagcttctgtggggcgaggctctgctgattacacctgtattgcaacctggtaaggccgaagttaccgggtactttccattggggacctggtatgatctgcaaacagtcccggttgaagctcttggaagtcttccacctccacctgctgcaccaagggagcctgcgatccactctgaaggacagtgggtaactttgcctgcaccgctggacaccatcaatgtccatctgcgcgcgggctacatcataccacttcaaggtcctggactgaccactacagagtctagaaaacaaccaatggctcttgctgttgcactgactaaaagcggcgaagcaaggggtgagctgttctgggacgacggagagtcactggaggtattggaacgaggcgcgtatacgcaggtcatttttgaggctcgcaataatacgatcgttaacgagctggtccacgtcacttcagaaggtgcaggccttcagttgggcaaggtaactgtcctgggagttgctacagcaccgcagcaggtcttgtccaacggaaggcccgtaagcaactttacctatagtcctgataccaaagttctggacatctgcgttgctctgctgatgggtgagcagttcctggtatcatggtgc

SEQ ID NO: 8 - protein, 944 aa, synthetic construct
  REGION 1..944: note = Variant of the Homo Sapiens Lysosomal alpha-glucosidase
MEWSWVFLFFLSVTTGVHSGHILWHDFSTVPRELSGSSQVLEETHPAHQVGASRPGPRDAQAHPGRPRAVPTQCDVPENSRFDCAPEKAITQEQCEARGCCYIPAKQGLQGAQMGQPWCFFPPSYPSYKLENLSQSEMGYTATLTRTTPSFFPKDILTLRLDVMMETENRLHFTIKDPANRRYEVPLETPHVHSRAPSPLYSVEFSEEPFGVIVRRQLDGRVLLNTTVAPLFFADQFLQLSTSLPSQYITGLAEHLSPLMLSTSWNKITLWNRDLAPTPGANLYGSHPFYLALEDGGSAHGVFLLNSNAMDVVLQPSPALSWRSTGGILDVYIFLGPEPKSVVQQYLDVVGYPFMPPYWGLGFHLCRWGYSSTAITRQVVENMTRAHFPLDVQWNDLDYMDSRRDFTFNKDGFRDFPAMVQELHQGGRRYMMIVDPAISSSGPAGSYRPYDEGLRRGVFITNETGQPLIGKVWPGSTAFPDFTNPEALAWWEDMVAEFHDQVPFDGMWIDMNEPSNFIRGSVDGCPRNELENPPYVPGVVGGTLQAATICASSHQFLSTHYNLHNLYGTTEAIASHRALVKARGTRPFVISRSTFAGHGRYAGHWTGDVWSSWEQLASSVPEILQFNLLGVPLVGADVCGFLGNTSEELCVRWTQLGAFYPFMRNHNSLTSLPQEPYSFSEPAQQAMRKALTLRYALLPHLYTLFHQAHVHGETVARPLFLEFPKDSSTWTVDHQLLWGEALLITPVLQPGKAEVTGYFPLGTWYDLQTVPVEALGSLPPPPAAPREPAIHSEGQWVTLPAPLDTINVHLRAGYIIPLQGPGLTTTESRKQPMALAVALTKSGEARGELFWDDGESLEVLERGAYTQVIFEARNNTIVNELVHVTSEGAGLQLGKVTVLGVATAPQQVLSNGRPVSNFTYSPDTKVLDICVALLMGEQFLVSWC

SEQ ID NO: 9 - DNA, 2832 bp, synthetic construct
  misc_feature 1..2832: note = Variant of the Homo Sapiens Lysosomal alpha-glucosidase
  source 1..2832: mol_type = other DNA
atggaatggagctgggtctttctcttcttcctgtcagtaacgactggtgtccactccggacacattctgtggcatgatttttctaccgtgcctagagagctttccggttcaagtcaagtcctcgaagaaacacatccagcccatcaggttggcgcatctaggccgggccctcgggacgctcaagctcacccagggagacctagggccgttcccactcagtgcgacgtgccagagaactcacgcttcgattgtgcacctgagaaggctatcacgcaagagcagtgcgaggcccgcggatgttgttacataccggctaaacaggggctgcagggtgcgcagatgggccaaccttggtgcttcttcccaccatcctatccgagttacaagctggagaatctctcccagtctgaaatgggatataccgcaacactgactcggaccaccccctccttctttcccaaagatatcttgactctgagacttgacgtaatgatggagacagaaaacaggctccactttaccattaaggaccctgccaatcgccgatacgaggtgcctctggaaacaccacacgtgcacagtagagctccatcacctctgtattctgtcgagttctccgaagagccgtttggcgttatcgtcaggaggcagctcgacgggcgagtgcttctgaacacgactgtggccccgttgttctttgcggatcagtttctgcaactgtcaacaagtctcccttctcagtacattaccgggcttgcagagcatctgtccccactcatgctgagtacttcatggaacaaaatcacactgtggaatagagaccttgctcctactccaggagccaacttgtatggttctcaccctttctacttggccctggaagatggcggatcagcgcatggcgtattcctcctgaattccaacgcaatggacgttgttcttcagccatctcctgctttgagttggagatctacaggcgggatactggacgtctacatctttctgggtccagagcctaaatccgtagtgcagcagtatcttgatgtcgtcggatacccgtttatgccaccatattggggcctggggttccacttgtgccgctggggatattcatccaccgccattacacgacaagttgttgagaatatgaccagggcacattttcctctggatgtacagtggaacgacctggactacatggatagtcgccgcgacttcaccttcaataaggatgggttcagagactttcctgctatggtccaagaacttcaccagggaggcaggaggtacatgatgatcgtagatccgggaatttcttcttctggcccagccggttcatacagaccgtatgacgaaggactgcgacgaggcgtctttatcacgaacgagactggtcagcctttgataggcaaggtttggccagggtccaccgctttcccggatttcacaaatcctgaggcactggcctggtgggaagatatggtcgccgagtttcacgaccaggtcccatttgacgggatgtggatcgacatgaacgagccatccaacttcattagaggaagtgtggatggctgtccgaataatgagctggaaaaccctccttacgtaccaggcgttgttggtgggactcttcaagctgcgacgatttgcgcatcctcccatcagttcctgtcaacccactataacttgcacaatctgtacgggacaacagaggctatcgccagtcatagggccctggtaaaagctagaggaacacgccctttcgttatctctcgctcaacttttgcaggccacggtaggtatgccggacattggaccggcgacgtctggagttcttgggaacagctggcttcctccgttccagagatattgcagtttaacctgttgggagtcccacttgtaggtgcagatgtttgtggcttcctggggaacacctcagaagaattgtgcgtaagatggactcaactgggcgccttctacccttttatgcgcaatcacaactcactgacatctttgcctcaagaaccgtactcatttagtgagccagcacagcaggccatgaggaaggctcttggcctgagatatgcacttctgccgcatctgtacacccttttccaccaggctcatgtccatggagagactgttgcacgacctctgttcttggagttcccaaaagactcttccacgtggacagtcgatcaccagatgctgtggggcgaggctctgctgattacacctgtattgcaacctggtaaggccgaagttaccgggtactttccattggggacctggtatgatctgcaaacagtcccggttgaagctcttggaagtcttccacctccacctgctgcaccaagggagcctgcgatccactctgaaggacagtgggtaactttgcctgcaccgctggacaccatcaatgtccatctgcgcgaaggctacatcataccacttcaaggtcctggactgaccactacagagtctagaaagcaaccaatggctcttgctgttgcactgactaaaagcggcgaagcaaggggtgagctgttctgggacgacggagagtcactggaggtactggaacgaggcgcgtatacgcaggtcatttttctggctcgcaataatacgatcagcaacgagctggtccacgtcacttcagaaggtgcaggccttcagttgggcaaggtaactgtcctgggagttgctacagcaccgcagcaggtcttgtccaacggacggcccgtaagcaactttacctatagtcctgataccaaagttctggacatctgcgttagcctgctgatgggtgagcagttcctggtatcatggtgc

SEQ ID NO: 10 - protein, 944 aa, synthetic construct
  REGION 1..944: note = Variant of the Homo Sapiens Lysosomal alpha-glucosidase
MEWSWVFLFFLSVTTGVHSGHILWHDFSTVPRELSGSSQVLEETHPAHQVGASRPGPRDAQAHPGRPRAVPTQCDVPENSRFDCAPEKAITQEQCEARGCCYIPAKQGLQGAQMGQPWCFFPPSYPSYKLENLSQSEMGYTATLTRTTPSFFPKDILTLRLDVMMETENRLHFTIKDPANRRYEVPLETPHVHSRAPSPLYSVEFSEEPFGVIVRRQLDGRVLLNTTVAPLFFADQFLQLSTSLPSQYITGLAEHLSPLMLSTSWNKITLWNRDLAPTPGANLYGSHPFYLALEDGGSAHGVFLLNSNAMDVVLQPSPALSWRSTGGILDVYIFLGPEPKSVVQQYLDVVGYPFMPPYWGLGFHLCRWGYSSTAITRQVVENMTRAHFPLDVQWNDLDYMDSRRDFTFNKDGFRDFPAMVQELHQGGRRYMMIVDPGISSSGPAGSYRPYDEGLRRGVFITNETGQPLIGKVWPGSTAFPDFTNPEALAWWEDMVAEFHDQVPFDGMWIDMNEPSNFIRGSVDGCPNNELENPPYVPGVVGGTLQAATICASSHQFLSTHYNLHNLYGTTEAIASHRALVKARGTRPFVISRSTFAGHGRYAGHWTGDVWSSWEQLASSVPEILQFNLLGVPLVGADVCGFLGNTSEELCVRWTQLGAFYPFMRNHNSLTSLPQEPYSFSEPAQQAMRKALGLRYALLPHLYTLFHQAHVHGETVARPLFLEFPKDSSTWTVDHQMLWGEALLITPVLQPGKAEVTGYFPLGTWYDLQTVPVEALGSLPPPPAAPREPAIHSEGQWVTLPAPLDTINVHLREGYIIPLQGPGLTTTESRKQPMALAVALTKSGEARGELFWDDGESLEVLERGAYTQVIFLARNNTISNELVHVTSEGAGLQLGKVTVLGVATAPQQVLSNGRPVSNFTYSPDTKVLDICVSLLMGEQFLVSWC

SEQ ID NO: 11 - DNA, 2832 bp, synthetic construct
  misc_feature 1..2832: note = Variant of the Homo Sapiens Lysosomal alpha-glucosidase
  source 1..2832: mol_type = other DNA
atggaatggagctgggtctttctcttcttcctgtcagtaacgactggtgtccactccggacacattctgtggcatgatttttctaccgtgcctagagagctttccggttcaagtcaagtcctcgaagaaacacatccagcccatcaggttggcgcatctaggccgggccctcgggacgctcaactccacccagggagacctagggccgttcccactcagtgcgacgtgccagagaactcacgcttcgattgtgcacctgagaaggctatcacgcaagagcagtgcgaggcccgcggatgttgttacataccggctaaacaggggctgcagggtgcgcagatgggccaaccttggtgcttcttcccaccatcctatccgagttacaagctggagaatctctcccagtctgaaatgggatataccgcaacactgactcggaccaccccctccttctttcccaaagatatcttgactctgagacttgacgtaatgatggagacagaaaacaggctccactttaccattaaggaccctgccaatcgccgatacgaggtgcctctggaaacaccacacgtgcacagtagagctccatcacctctgtattctgtcgagttctccgaagagccgtttggcgttatcgtcaggaggcagctcgacgggcgagtgcttctgaacacgactgtggccccgttgttctttgcggatcagtttctgcaactgtcaacaagtctcccttctcagtacattaccgggcttgcagagcatctgtccccactcatgctgagtacttcatggaacaaaatcacactgtggaatagagaccttgctcctactccaggagccaacttgtatggttctcaccctttctacttggccctggaagatggcggatcagcgcatggcgtattcctcctgaattccaacgcaatggacgttgttcttcagccatctcctgctttgagttggagatctacaggcgggatactggacgtctacatctttctgggtccagagcctaaatccgtagtgcagcagtatcttgatgtcgtcggatacccgtttatgccaccatattggggcctggggttccacttgtgccgctggggatattcatccaccgccattacacgacaagttgttgagaatatgaccagggcacattttcctctggatgtacagtggaacgacctggactacatggatagtcgccgcgacttcaccttcaataaggatgggttcagagactttcctgctatggtccaagaacttcaccagggaggcaggaggtacatgatgatcgtagatccgggaatttcttcttctggcccagccggttcatacagaccgtatgacgaaggactgcgacgaggcgtctttatcacgaacgagactggtcagcctttgataggcaaggtttggccagggtccaccgctttcccggatttcacaaatcctgaggcactggcctggtgggaagatatggtcgccgagtttcacgaccaggtcccatttgacgggatgtggatcgacatgaacgagccatccaacttcattagaggaagtgtggatggctgtccgaataatgagctggaaaaccctccttacgtaccaggcgttgttggtgggactcttcaagctgcgacgatttgcgcatcctcccatcagttcctgtcaacccactataacttgcacaatctgtacgggacaacagaggctatcgccagtcatagggccctggtaaaagctagaggaacacgccctttcgttatctctcgctcaacttttgcaggccacggtaggtatgccggacattggaccggcgacgtctggagttcttgggaacagctggcttcctccgttccagagatattgcagtttaacctgttgggagtcccacttgtaggtgcagatgtttgtggcttcctggggaacacctcagaagaattgtgcgtaagatggactcaactgggcgccttctacccttttatgcgcaatcacaactcactgacatctttgcctcaagaaccgtactcatttagtgagccagcacagcaggccatgaggaaggctcttggcctgagatatgcacttctgccgcatctgtacacccttttccaccaggctcatgtccatggagagactgttgcacgacctctgttcttggagttcccaaaagactcttccacgtggacagtcgatcaccagatgctgtggggcgaggctctgctgattacacctgtattgcaacctggtaaggccgaagttaccgggtactttccattggggacctggtatgatctgcaaacagtcccggttgaagctcttggaagtcttccacctccacctgctgcaccaagggagcctgcgatccactctgaaggacagtgggtaactttgcctgcaccgctggacaccatcaatgtccatctgcgcgaaggctacatcataccacttcaaggtcctggactgaccactacagagtctagaaaacaaccaatggctcttgctgttgcactgactaaaagcggcgaagcaaggggtgagctgttctgggacgacggagagtcactggaggtactcgaacgaggcgcgtatacgcaggtcatttttgaggctcgcaataatacgatcgttaacgagctggtccacgtcacttcagaaggtgcaggccttcagttgggcaaggtaactgtcctgggagttgctacagcaccgcagcaggtcttgtccaacggacggcccgtaagcaactttacctatagtcctgataccaaagttctggacatctgcgttgctctgctgatgggtgagcagttcctggtatcatggtgc

SEQ ID NO: 12 - protein, 944 aa, synthetic construct
  REGION 1..944: note = Variant of the Homo Sapiens Lysosomal alpha-glucosidase
MEWSWVFLFFLSVTTGVHSGHILWHDFSTVPRELSGSSQVLEETHPAHQVGASRPGPRDAQLHPGRPRAVPTQCDVPENSRFDCAPEKAITQEQCEARGCCYIPAKQGLQGAQMGQPWCFFPPSYPSYKLENLSQSEMGYTATLTRTTPSFFPKDILTLRLDVMMETENRLHFTIKDPANRRYEVPLETPHVHSRAPSPLYSVEFSEEPFGVIVRRQLDGRVLLNTTVAPLFFADQFLQLSTSLPSQYITGLAEHLSPLMLSTSWNKITLWNRDLAPTPGANLYGSHPFYLALEDGGSAHGVFLLNSNAMDVVLQPSPALSWRSTGGILDVYIFLGPEPKSVVQQYLDVVGYPFMPPYWGLGFHLCRWGYSSTAITRQVVENMTRAHFPLDVQWNDLDYMDSRRDFTFNKDGFRDFPAMVQELHQGGRRYMMIVDPGISSSGPAGSYRPYDEGLRRGVFITNETGQPLIGKVWPGSTAFPDFTNPEALAWWEDMVAEFHDQVPFDGMWIDMNEPSNFIRGSVDGCPNNELENPPYVPGVVGGTLQAATICASSHQFLSTHYNLHNLYGTTEAIASHRALVKARGTRPFVISRSTFAGHGRYAGHWTGDVWSSWEQLASSVPEILQFNLLGVPLVGADVCGFLGNTSEELCVRWTQLGAFYPFMRNHNSLTSLPQEPYSFSEPAQQAMRKALGLRYALLPHLYTLFHQAHVHGETVARPLFLEFPKDSSTWTVDHQMLWGEALLITPVLQPGKAEVTGYFPLGTWYDLQTVPVEALGSLPPPPAAPREPAIHSEGQWVTLPAPLDTINVHLREGYIIPLQGPGLTTTESRKQPMALAVALTKSGEARGELFWDDGESLEVLERGAYTQVIFEARNNTIVNELVHVTSEGAGLQLGKVTVLGVATAPQQVLSNGRPVSNFTYSPDTKVLDICVALLMGEQFLVSWC

SEQ ID NO: 13 - DNA, 2832 bp, synthetic construct
  misc_feature 1..2832: note = Variant of the Homo Sapiens Lysosomal alpha-glucosidase
  source 1..2832: mol_type = other DNA
atggaatggagctgggtctttctcttcttcctgtcagtaacgactggtgtccactccggacacattctgtggcatgatttttctaccgtgcctagagagctttccggttcaagtcaagtcctcgaagaaacacatccagcccatcaggttggcgcatctaggccgggccctcgggacgctcaactccacccagggagacctagggccgttcccactcagtgcgacgtgccagagaactcacgcttcgattgtgcacctgagaaggctatcacgcaagagcagtgcgaggcccgcggatgttgttacataccggctaaacaggggctgcagggtgcgcagatgggccaaccttggtgcttcttcccaccatcctatccgagttacaagctggagaatctctcccagtctgaaatgggatataccgcaacactgactcggaccaccccctccttctttcccaaagatatcttgactctgagacttgacgtaatgatggagacagaaaacaggctccactttaccattaaggaccctgccaatcgccgatacgaggtgcctctggaaacaccacacgtgcacagtagagctccatcacctctgtattctgtcgagttctccgaagagccgtttggcgttatcgtcaggaggcagctcgacgggcgagtgcttctgaacacgactgtggccccgttgttctttgcggatcagtttctgcaactgtcaacaagtctcccttctcagtacattaccgggcttgcagagcatctgtccccactcatgctgagtacttcatggaacaaaatcacactgtggaatagagaccttgctcctactccaggagccaacttgtatggttctcaccctttctacttggccctggaagatggcggatcagcgcatggcgtattcctcgtgaattccaacgcaatggacgttgttcttcagccatctcctgctttgagttggagatctacaggcgggatactggacgtctacatctttctgggtccagagcctaaatccgtagtgcagcagtatcttgatgtcgtcggatacccgtttatgccaccatattggggcctggggttccacttgtgccgctggggatattcatccaccgccattacacgacaagttgttgagaatatgaccagggcacattttcctctggatgtacagtggaacgacctggactacatggatagtcgccgcgacttcaccttcaataaggatgggttcagagactttcctgctatggtccaagaacttcaccagggaggcaggaggtacatgatgatcgtagatccgggaatttcttcttctggcccagccggttcatacagaccgtatgacgaaggactgcgacgaggcgtctttatcacgaacgagactggtcagcctttgataggcaaggtttggccagggtccaccgctttcccggatttcacaaatcctgaggcactggcctggtgggaagatatggtcgccgagtttcacgaccaggtcccatttgacgggatgtggatcgacatgaacgagccatccaacttcattagaggaagtgtggatggctgtccgaataatgagctggaaaaccctccttacgtaccaggcgttgttggtgggactcttcaagctgcgacgatttgcgcatcctcccatcagttcctgtcaacccactataacttgcacaatctgtacgggacaacagaggctatcgccagtcatagggccctggtaaaagctagaggaacacgccctttcgttatctctcgctcaacttttgcaggccacggtaggtatgccggacattggaccggcgacgtctggagttcttgggaacagctggcttcctccgttccagagatattgcagtttaacctgttgggagtcccacttgtaggtgcagatgtttgtggcttcctggggaacacctcagaagaattgtgcgtaagatggactcaactgggcgccttctacccttttatgcgcaatcacaactcactgacatctttgcctcaagaaccgtactcatttagtgagccagcacagcaggccatgaggaaggctcttggcctgagatatgcacttctgccgcatctgtacacccttttccaccaggctcatgtccatggagagactgttgcacgacctctgttcttggagttcccaaaagactcttccacgtggacagtcgatcaccagatgctgtggggcgaggctctgctgattacacctgtattgcaacctggtaaggccgaagttaccgggtactttccattggggacctggtatgatctgcaaacagtcccggttgaagctcttggaagtcttccacctccacctgctgcaccaagggagcctgcgatccactctgaaggacagtgggtaactttgcctgcaccgctggacaccatcaatgtccatctgcgcgaaggctacatcataccacttcaaggtcctggactgaccactacagagtctagaaaacaaccaatggctcttgctgttgcactgactaaaagcggcgaagcaaggggtgagctgttctgggacgacggagagtcactggaggtactcgaacgaggcgcgtatacgcaggtcatttttgaggctcgcaataatacgatcgttaacgagctggtccacgtcacttcagaaggtgcaggccttcagttgggcaaggtaactgtcctgggagttgctacagcaccgcagcaggtcttgtccaacggacggcccgtaagcaactttacctatagtcctgataccaaagttctggacatctgcgttgctctgctgatgggtgagcagttcctggtatcatggtgc

SEQ ID NO: 14 - protein, 944 aa, synthetic construct
  REGION 1..944: note = Variant of the Homo Sapiens Lysosomal alpha-glucosidase
MEWSWVFLFFLSVTTGVHSGHILWHDFSTVPRELSGSSQVLEETHPAHQVGASRPGPRDAQLHPGRPRAVPTQCDVPENSRFDCAPEKAITQEQCEARGCCYIPAKQGLQGAQMGQPWCFFPPSYPSYKLENLSQSEMGYTATLTRTTPSFFPKDILTLRLDVMMETENRLHFTIKDPANRRYEVPLETPHVHSRAPSPLYSVEFSEEPFGVIVRRQLDGRVLLNTTVAPLFFADQFLQLSTSLPSQYITGLAEHLSPLMLSTSWNKITLWNRDLAPTPGANLYGSHPFYLALEDGGSAHGVFLVNSNAMDVVLQPSPALSWRSTGGILDVYIFLGPEPKSVVQQYLDVVGYPFMPPYWGLGFHLCRWGYSSTAITRQVVENMTRAHFPLDVQWNDLDYMDSRRDFTFNKDGFRDFPAMVQELHQGGRRYMMIVDPGISSSGPAGSYRPYDEGLRRGVFITNETGQPLIGKVWPGSTAFPDFTNPEALAWWEDMVAEFHDQVPFDGMWIDMNEPSNFIRGSVDGCPNNELENPPYVPGVVGGTLQAATICASSHQFLSTHYNLHNLYGTTEAIASHRALVKARGTRPFVISRSTFAGHGRYAGHWTGDVWSSWEQLASSVPEILQFNLLGVPLVGADVCGFLGNTSEELCVRWTQLGAFYPFMRNHNSLTSLPQEPYSFSEPAQQAMRKALGLRYALLPHLYTLFHQAHVHGETVARPLFLEFPKDSSTWTVDHQMLWGEALLITPVLQPGKAEVTGYFPLGTWYDLQTVPVEALGSLPPPPAAPREPAIHSEGQWVTLPAPLDTINVHLREGYIIPLQGPGLTTTESRKQPMALAVALTKSGEARGELFWDDGESLEVLERGAYTQVIFEARNNTIVNELVHVTSEGAGLQLGKVTVLGVATAPQQVLSNGRPVSNFTYSPDTKVLDICVALLMGEQFLVSWC

SEQ ID NO: 15 - DNA, 2832 bp, synthetic construct
  misc_feature 1..2832: note = Variant of the Homo Sapiens Lysosomal alpha-glucosidase
  source 1..2832: mol_type = other DNA
atggaatggagctgggtctttctcttcttcctgtcagtaacgactggtgtccactccggacacattctgtggcatgatttttctaccgtgcctagagagctttccggttcaagtcaagtcctcgaagaaacacatccagcccatcaggttggcgcatctaggccgggccctcgggacgctcaactccacccagggagacctagggccgttcccactcagtgcgacgtgccagagaactcacgcttcgattgtgcacctgagaaggctatcacgcaagagcagtgcgaggcccgcggatgttgttacataccggctaaacaggggctgcagggtgcgcagatgggccaaccttggtgcttcttcccaccatcctatccgagttacaagctggagaatctctccccttctgaaatgggatataccgcaacactgactcggaccaccccctccttctttcccaaagatatcttgactctgagacttgacgtaatgatggagacagaaaacaggctccactttaccattaaggaccctgccaatcgccgatacgaggtgcctctggaaacaccacacgtgcacagtagagctccatcacctctgtattctgtcgagttctccgaagagccgtttggcgttatcgtcaggaggcagctcgacgggcgagtgcttctgaacacgactgtggccccgttgttctttgcggatcagtttctgcaactgtcaacaagtctcccttctcagtacattaccgggcttgcagagcatctgtccccactcatgctgagtacttcatggaacaaaatcacactgtggaatagagaccttgctcctactccaggagccaacttgtatggttctcaccctttctacttggccctggaagatggcggatcagcgcatggcgtattcctcctgaattccaacgcaatggacgttgttcttcagccatctcctgctttgagttggagatctacaggcgggatactggacgtctacatctttctgggtccagagcctaaatccgtagtgcagcagtatcttgatgtcgtcggatacccgtttatgccaccatattggggcctggggttccacttgtgccgctggggatattcatccaccgccattacacgacaagttgttgagaatatgaccagggcacattttcctctggatgtacagtggaacgacctggactacatggatagtcgccgcgacttcaccttcaataaggatgggttcagagactttcctgctatggtccaagaacttcaccagggaggcaggaggtacatgatgatcgtagatccgggaatttcttcttctggcccagccggttcatacagaccgtatgacgaaggactgcgacgaggcgtctttatcacgaacgagactggtcagcctttgataggcaaggtttggccagggtccaccgctttcccggatttcacaaatcctgaggcactggcctggtgggaagatatggtcgccgagtttcacgaccaggtcccatttgacgggatgtggatcgacatgaacgagccatccaacttcattagaggaagtgtggatggctgtccgaataatgagctggaaaaccctccttacgtaccaggcgttgttggtgggactcttcaagctgcgacgatttgcgcatcctcccatcagttcctgtcaacccactataacttgcacaatctgtacgggacaacagaggctatcgccagtcatagggccctggtaaaagctagaggaacacgccctttcgttatctctcgctcaacttttgcaggccacggtaggtatgccggacattggaccggcgacgtctggagttcttgggaacagctggcttcctccgttccagagatattgcagtttaacctgttgggagtcccacttgtaggtgcagatgtttgtggcttcctggggaacacctcagaagaattgtgcgtaagatggactcaactgggcgccttctacccttttatgcgcaatcacaactcactgacatctttgcctcaagaaccgtactcatttagtgagccagcacagcaggccatgaggaaggctcttggcctgagatatgcacttctgccgcatctgtacacccttttccaccaggctcatgtccatggagagactgttgcacgacctctgttcttggagttcccaaaagactcttccacgtggacagtcgatcaccagatgctgtggggcgaggctctgctgattacacctgtattgcaacctggtaaggccgaagttaccgggtactttccattggggacctggtatgatctgcaaacagtcccggttgaagctcttggaagtcttccacctccacctgctgcaccaagggagcctgcgatccactctgaaggacagtgggtaactttgcctgcaccgctggacaccatcaatgtccatctgcgcgaaggctacatcataccacttcaaggtcctggactgaccactacagagtctagaaaacaaccaatggctcttgctgttgcactgactaaaagcggcgaagcaaggggtgagctgttctgggacgacggagagtcactggaggtactcgaacgaggcgcgtatacgcaggtcatttttgaggctcgcaataatacgatcgttaacgagctggtccacgtcacttcagaaggtgcaggccttcagttgggcaaggtaactgtcctgggagttgctacagcaccgcagcaggtcttgtccaacggacggcccgtaagcaactttacctatagtcctgataccaaagttctggacatctgcgttgctctgctgatgggtgagcagttcctggtatcatggtgc

SEQ ID NO: 16 - protein, 944 aa, synthetic construct
  REGION 1..944: note = Variant of the Homo Sapiens Lysosomal alpha-glucosidase
MEWSWVFLFFLSVTTGVHSGHILWHDFSTVPRELSGSSQVLEETHPAHQVGASRPGPRDAQLHPGRPRAVPTQCDVPENSRFDCAPEKAITQEQCEARGCCYIPAKQGLQGAQMGQPWCFFPPSYPSYKLENLSPSEMGYTATLTRTTPSFFPKDILTLRLDVMMETENRLHFTIKDPANRRYEVPLETPHVHSRAPSPLYSVEFSEEPFGVIVRRQLDGRVLLNTTVAPLFFADQFLQLSTSLPSQYITGLAEHLSPLMLSTSWNKITLWNRDLAPTPGANLYGSHPFYLALEDGGSAHGVFLLNSNAMDVVLQPSPALSWRSTGGILDVYIFLGPEPKSVVQQYLDVVGYPFMPPYWGLGFHLCRWGYSSTAITRQVVENMTRAHFPLDVQWNDLDYMDSRRDFTFNKDGFRDFPAMVQELHQGGRRYMMIVDPGISSSGPAGSYRPYDEGLRRGVFITNETGQPLIGKVWPGSTAFPDFTNPEALAWWEDMVAEFHDQVPFDGMWIDMNEPSNFIRGSVDGCPNNELENPPYVPGVVGGTLQAATICASSHQFLSTHYNLHNLYGTTEAIASHRALVKARGTRPFVISRSTFAGHGRYAGHWTGDVWSSWEQLASSVPEILQFNLLGVPLVGADVCGFLGNTSEELCVRWTQLGAFYPFMRNHNSLTSLPQEPYSFSEPAQQAMRKALGLRYALLPHLYTLFHQAHVHGETVARPLFLEFPKDSSTWTVDHQMLWGEALLITPVLQPGKAEVTGYFPLGTWYDLQTVPVEALGSLPPPPAAPREPAIHSEGQWVTLPAPLDTINVHLREGYIIPLQGPGLTTTESRKQPMALAVALTKSGEARGELFWDDGESLEVLERGAYTQVIFEARNNTIVNELVHVTSEGAGLQLGKVTVLGVATAPQQVLSNGRPVSNFTYSPDTKVLDICVALLMGEQFLVSWC

SEQ ID NO: 17 - DNA, 2832 bp, synthetic construct
  misc_feature 1..2832: note = Variant of the Homo Sapiens Lysosomal alpha-glucosidase
  source 1..2832: mol_type = other DNA
atggaatggagctgggtctttctcttcttcctgtcagtaacgactggtgtccactccggacacattctgtggcatgatttttctaccgtgcctagagagctttccggttcaagtcaagtcctcgaagaaacacatccagcccatcaggttggcgcatctaggccgggccctcgggacgctcaactccacccagggagacctagggccgttcccactcagtgcgacgtgccagagaactcacgcttcgattgtgcacctgagaaggctatcacgcaagagcagtgcgaggcccgcggatgttgttacataccggctaaacaggggctgcagggtgcgcagatgggccaaccttggtgcttcttcccaccatcctatccgagttacaagctggagaatctctcccagtctgaaatgggatataccgcaacactgactcggaccaccccctccttctttcccaaagatatcttgactctgagacttgacgtaatgatggagacagaaaacaggctccactttaccattaaggaccctgccaatcgccgatacgaggtgcctctggaaacaccacacgtgcacagtagagctccatcacctctgtattctgtcgagttctccgaagagccgtttggcgttatcgtcaggaggcagctcgacgggcgagtgcttctgaacacgactgtggccccgttgttctttgcggatcagtttctgcaactgtcaacaagtctcccttctcagtacattaccgggcttgcagagcatctgtccccactcatgctgagtacttcatggaacaaaatcacactgtggaatagagaccttgctcctactccaggagccaacttgtatggttctcaccctttctacttggccctggaagatggcggatcagcgcatggcgtattcctcctgaattccaacgcaatggacgttgttcttcagccatctcctgctttgagttggagatctacaggcgggatactggacgtctacatctttctgggtccagagcctaaatccgtagtgcagcagtatcttgatgtcgtcggatacccgtttatgccaccatattggggcctggggttccacttgtgccgctggggatattcatccaccgccattacacgacaagttgttgagaatatgaccagggcacattttcctctggatgtacagtggaacgacctggactacatggatagtcgccgcgacttcaccttcaataaggatgggttcagagactttcctgctatggtccaagaacttcaccagggaggcaggaggtacatgatgatcgtagatccgggaatttcttcttctggcccagccggttcatacagaccgtatgacgaaggactgcgacgaggcgtctttatcacgaacgagactggtcagcctttgataggcaaggtttggccagggtccaccgctttcccggatttcacaaatcctcaggcactggcctggtgggaagatatggtcgccgagtttcacgaccaggtcccatttgacgggatgtggatcgacatgaacgagccatccaacttcattagaggaagtgtggatggctgtccgaataatgagctggaaaaccctccttacgtaccaggcgttgttggtgggactcttcaagctgcgacgatttgcgcatcctcccatcagttcctgtcaacccactataacttgcacaatctgtacgggacaacagaggctatcgccagtcatagggccctggtaaaagctagaggaacacgccctttcgttatctctcgctcaacttttgcaggccacggtaggtatgccggacattggaccggcgacgtctggagttcttgggaacagctggcttcctccgttccagagatattgcagtttaacctgttgggagtcccacttgtaggtgcagatgtttgtggcttcctggggaacacctcagaagaattgtgcgtaagatggactcaactgggcgccttctacccttttatgcgcaatcacaactcactgacatctttgcctcaagaaccgtactcatttagtgagccagcacagcaggccatgaggaaggctcttggcctgagatatgcacttctgccgcatctgtacacccttttccaccaggctcatgtccatggagagactgttgcacgacctctgttcttggagttcccaaaagactcttccacgtggacagtcgatcaccagatgctgtggggcgaggctctgctgattacacctgtattgcaacctggtaaggccgaagttaccgggtactttccattggggacctggtatgatctgcaaacagtcccggttgaagctcttggaagtcttccacctccacctgctgcaccaagggagcctgcgatccactctgaaggacagtgggtaactttgcctgcaccgctggacaccatcaatgtccatctgcgcgaaggctacatcataccacttcaaggtcctggactgaccactacagagtctagaaaacaaccaatggctcttgctgttgcactgactaaaagcggcgaagcaaggggtgagctgttctgggacgacggagagtcactggaggtactcgaacgaggcgcgtatacgcaggtcatttttgaggctcgcaataatacgatcgttaacgagctggtccacgtcacttcagaaggtgcaggccttcagttgggcaaggtaactgtcctgggagttgctacagcaccgcagcaggtcttgtccaacggacggcccgtaagcaactttacctatagtcctgataccaaagttctggacatctgcgttgctctgctgatgggtgagcagttcctggtatcatggtgc

SEQ ID NO: 18 - protein, 944 aa, synthetic construct
  REGION 1..944: note = Variant of the Homo Sapiens Lysosomal alpha-glucosidase
MEWSWVFLFFLSVTTGVHSGHILWHDFSTVPRELSGSSQVLEETHPAHQVGASRPGPRDAQLHPGRPRAVPTQCDVPENSRFDCAPEKAITQEQCEARGCCYIPAKQGLQGAQMGQPWCFFPPSYPSYKLENLSQSEMGYTATLTRTTPSFFPKDILTLRLDVMMETENRLHFTIKDPANRRYEVPLETPHVHSRAPSPLYSVEFSEEPFGVIVRRQLDGRVLLNTTVAPLFFADQFLQLSTSLPSQYITGLAEHLSPLMLSTSWNKITLWNRDLAPTPGANLYGSHPFYLALEDGGSAHGVFLLNSNAMDVVLQPSPALSWRSTGGILDVYIFLGPEPKSVVQQYLDVVGYPFMPPYWGLGFHLCRWGYSSTAITRQVVENMTRAHFPLDVQWNDLDYMDSRRDFTFNKDGFRDFPAMVQELHQGGRRYMMIVDPGISSSGPAGSYRPYDEGLRRGVFITNETGQPLIGKVWPGSTAFPDFTNPQALAWWEDMVAEFHDQVPFDGMWIDMNEPSNFIRGSVDGCPNNELENPPYVPGVVGGTLQAATICASSHQFLSTHYNLHNLYGTTEAIASHRALVKARGTRPFVISRSTFAGHGRYAGHWTGDVWSSWEQLASSVPEILQFNLLGVPLVGADVCGFLGNTSEELCVRWTQLGAFYPFMRNHNSLTSLPQEPYSFSEPAQQAMRKALGLRYALLPHLYTLFHQAHVHGETVARPLFLEFPKDSSTWTVDHQMLWGEALLITPVLQPGKAEVTGYFPLGTWYDLQTVPVEALGSLPPPPAAPREPAIHSEGQWVTLPAPLDTINVHLREGYIIPLQGPGLTTTESRKQPMALAVALTKSGEARGELFWDDGESLEVLERGAYTQVIFEARNNTIVNELVHVTSEGAGLQLGKVTVLGVATAPQQVLSNGRPVSNFTYSPDTKVLDICVALLMGEQFLVSWC

SEQ ID NO: 19 - DNA, 2832 bp, synthetic construct
  misc_feature 1..2832: note = Variant of the Homo Sapiens Lysosomal alpha-glucosidase
  source 1..2832: mol_type = other DNA
atggaatggagctgggtctttctcttcttcctgtcagtaacgactggtgtccactccggacacattctgtggcatgatttttctaccgtgcctagagagctttccggttcaagtcaagtcctcgaagaaacacatccagcccatcaggttggcgcatctaggccgggccctcgggacgctcaactccacccagggagacctagggccgttcccactcagtgcgacgtgccagagaactcacgcttcgattgtgcacctgagaaggctatcacgcaagagcagtgcgaggcccgcggatgttgttacataccggctaaacaggggctgcagggtgcgcagatgggccaaccttggtgcttcttcccaccatcctatccgagttacaagctggagaatctctcccagtctgaaatgggatataccgcaacactgactcggaccaccccctccttctttcccaaagatatcttgactctgagacttgacgtaatgatggagacagaaaacaggctccactttaccattaaggaccctgccaatcgccgatacgaggtgcctctggaaacaccacacgtgcacagtagagctccatcacctctgtattctgtcgagttctccgaagagccgtttggcgttatcgtcaggaggcagctcgacgggcgagtgcttctgaacacgactgtggccccgttgttctttgcggatcagtttctgcaactgtcaacaagtctcccttctcagtacattaccgggcttgcagagcatctgtccccactcatgctgagtacttcatggaacaaaatcacactgtggaatagagaccttgctcctactccaggagccaacttgtatggttctcaccctttctacttggccctggaagatggcggatcagcgcatggcgtattcctcctgaattccaacgcaatggacgttgttcttcagccatctcctgctttgagttggagatctacaggcgggatactggacgtctacatctttctgggtccagagcctaaatccgtagtgcagcagtatcttgatgtcgtcggatacccgtttatgccaccatattggggcctggggttccacttgtgccgctggggatattcatccaccgccattacacgacaagttgttgagaatatgaccagggcacattttcctctggatgtacagtggaacgacctggactacatggatagtcgccgcgacttcaccttcaataaggatgggttcagagactttcctgctatggtccaagaacttcaccagggaggcaggaggtacatgatgatcgtagatccgggaatttcttcttctggcccagccggttcatacagaccgtatgacgaaggactgcgacgaggcgtctttatcacgaacgagactggtcagcctttgataggcaaggtttggccagggtccaccgctttcccggatttcacaaatcctgaggcactggcctggtgggaagatatggtcgccgagtttcacgaccaggtcccatttgacgggatgtggatcgacatgaacgagccatccaacttcattagaggaagtgtggatggctgtccgaataatgagctggaaaaccctccttacgtaccaggcgttgttggtgggactcttcaagctgcgacgatttgcgcatcctcccatcagttcctgtcaacccactataacttgcacaatctgtacgggacaacagaggctatcgccagtcatagggccctggtaaaagctagaggaacacgccctttcgttatctctcgctcaacttttgcaggccacggtaggtatgccggacattggaccggcgacgtctggagttcttgggaacagctggcttcctccgttccagagatattgcagtttaacctgttgggagtcccacttgtaggtgcagatgtttgtggcttcctggggaacacctcagaagaattgtgcgtaagatggactcaactgggcgccttctacccttttatgcgcaatcacaactcactgacatctttgcctcaagaaccgtactcatttagtgagccagcacagcaggccatgaggaaggctcttggcctgagatatgcacttctgccgcatctgtacacccttttccaccaggctcatgtccatggagagactgttgcacgacctctgttcttggagttcccaaaagactcttccacgtggacagtcgatcaccagatgctgtggggcgaggctctgctgattacacctgtattgcaacctggtaaggccgaagttaccgggtactttccattggggacctggtatgatctgcaaacagtcccggttgaagctcttggaagtcttccacctccacctgctgcaccaagggagcctgcgatccactctgaaggacagtgggtaactttgcctgcaccgctggacaccatcaatgtccatctgcgcgaaggctacatcataccacttcaaggtcctggactgaccactacagagtctagaaaacaaccaatggctcttgctgttgcactgactaaagagggcgaagcaaggggtgagctgttctgggacgacggagagtcactggaggtactcgaacgaggcgcgtatacgcaggtcatttttgaggctcgcaataatacgatcgttaacgagctggtccacgtcacttcagaaggtgcaggccttcagttgggcaaggtaactgtcctgggagttgctacagcaccgcagcaggtcttgtccaacggacggcccgtaagcaactttacctatagtcctgataccaaagttctggacatctgcgttgctctgctgatgggtgagcagttcctggtatcatggtgc

SEQ ID NO: 20 - protein, 944 aa, synthetic construct
  REGION 1..944: note = Variant of the Homo Sapiens Lysosomal alpha-glucosidase
MEWSWVFLFFLSVTTGVHSGHILWHDFSTVPRELSGSSQVLEETHPAHQVGASRPGPRDAQLHPGRPRAVPTQCDVPENSRFDCAPEKAITQEQCEARGCCYIPAKQGLQGAQMGQPWCFFPPSYPSYKLENLSQSEMGYTATLTRTTPSFFPKDILTLRLDVMMETENRLHFTIKDPANRRYEVPLETPHVHSRAPSPLYSVEFSEEPFGVIVRRQLDGRVLLNTTVAPLFFADQFLQLSTSLPSQYITGLAEHLSPLMLSTSWNKITLWNRDLAPTPGANLYGSHPFYLALEDGGSAHGVFLLNSNAMDVVLQPSPALSWRSTGGILDVYIFLGPEPKSVVQQYLDVVGYPFMPPYWGLGFHLCRWGYSSTAITRQVVENMTRAHFPLDVQWNDLDYMDSRRDFTFNKDGFRDFPAMVQELHQGGRRYMMIVDPGISSSGPAGSYRPYDEGLRRGVFITNETGQPLIGKVWPGSTAFPDFTNPEALAWWEDMVAEFHDQVPFDGMWIDMNEPSNFIRGSVDGCPNNELENPPYVPGVVGGTLQAATICASSHQFLSTHYNLHNLYGTTEAIASHRALVKARGTRPFVISRSTFAGHGRYAGHWTGDVWSSWEQLASSVPEILQFNLLGVPLVGADVCGFLGNTSEELCVRWTQLGAFYPFMRNHNSLTSLPQEPYSFSEPAQQAMRKALGLRYALLPHLYTLFHQAHVHGETVARPLFLEFPKDSSTWTVDHQMLWGEALLITPVLQPGKAEVTGYFPLGTWYDLQTVPVEALGSLPPPPAAPREPAIHSEGQWVTLPAPLDTINVHLREGYIIPLQGPGLTTTESRKQPMALAVALTKEGEARGELFWDDGESLEVLERGAYTQVIFEARNNTIVNELVHVTSEGAGLQLGKVTVLGVATAPQQVLSNGRPVSNFTYSPDTKVLDICVALLMGEQFLVSWC

SEQ ID NO: 21 - DNA, 2832 bp, synthetic construct
  misc_feature 1..2832: note = Variant of the Homo Sapiens Lysosomal alpha-glucosidase
  source 1..2832: mol_type = other DNA
atggaatggagctgggtctttctcttcttcctgtcagtaacgactggtgtccactccggacacattctgtggcatgatttttctaccgtgcctagagagctttccggttcaagtcaagtcctcgaagaaacacatccagcccatcaggttggcgcatctaggccgggccctcgggacgctcaactccacccagggagacctagggccgttcccactcagtgcgacgtgccagggaactcacgcttcgattgtgcacctgagaaggctatcacgcaagagcagtgcgaggcccgcggatgttgttacataccggctaaacaggggctgcagggtgcgcagatgggccaaccttggtgcttcttcccaccatcctatccgagttacaagctggagaatctctcccagtctgaaatgggatataccgcaacactgactcggaccaccccctccttctttcccaaagatatcttgactctgagacttgacgtaatgatggagacagaaaacaggctccactttaccattaaggaccctgccaatcgccgatacgaggtgcctctggaaacaccacacgtgcacagtagagctccatcacctctgtattctgtcgagttctccgaagagccgtttggcgttatcgtcaggaggcagctcgacgggcgagtgcttctgaacacgactgtggccccgttgttctttgcggatcagtttctgcaactgtcaacaagtctcccttctcagtacattaccgggcttgcagagcatctgtccccactcatgctgagtacttcatggaacaaaatcacactgtggaatagagaccttgctcctactccaggagccaacttgtatggttctcaccctttctacttggccctggaagatggcggatcagcgcatggcgtattcctcctgaattccaacgcaatggacgttgttcttcagccatctcctgctttgagttggagatctacaggcgggatactggacgtctacatctttctgggtccagagcctaaatccgtagtgcagcagtatcttgatgtcgtcggatacccgtttatgccaccatattggggcctggggttccacttgtgccgctggggatattcatccaccgccattacacgacaagttgttgagaatatgaccagggcacattttcctctggatgtacagtggaacgacctggactacatggatagtcgccgcgacttcaccttcaataaggatgggttcagagactttcctgctatggtccaagaacttcaccagggaggcaggaggtacatgatgatcgtagatccgggaatttcttcttctggcccagccggttcatacagaccgtatgacgaaggactgcgacgaggcgtctttatcacgaacgagactggtcagcctttgataggcaaggtttggccagggtccaccgctttcccggatttcacaaatcctgaggcactggcctggtgggaagatatggtcgccgagtttcacgaccaggtcccatttgacgggatgtggatcgacatgaacgagccatccaacttcattagaggaagtgtggatggctgtccgaataatgagctggaaaaccctccttacgtaccaggcgttgttggtgggactcttcaagctgcgacgatttgcgcatcctcccatcagttcctgtcaacccactataacttgcacaatctgtacgggacaacagaggctatcgccagtcatagggccctggtaaaagctagaggaacacgccctttcgttatctctcgctcaacttttgcaggccacggtaggtatgccggacattggaccggcgacgtctggagttcttgggaacagctggcttcctccgttccagagatattgcagtttaacctgttgggagtcccacttgtaggtgcagatgtttgtggcttcctggggaacacctcagaagaattgtgcgtaagatggactcaactgggcgccttctacccttttatgcgcaatcacaactcactgacatctttgcctcaagaaccgtactcatttagtgagccagcacagcaggccatgaggaaggctcttggcctgagatatgcacttctgccgcatctgtacacccttttccaccaggctcatgtccatggagagactgttgcacgacctctgttcttggagttcccaaaagactcttccacgtggacagtcgatcaccagatgctgtggggcgaggctctgctgattacacctgtattgcaacctggtaaggccgaagttaccgggtactttccattggggacctggtatgatctgcaaacagtcccggttgaagctcttggaagtcttccacctccacctgctgcaccaagggagcctgcgatccactctgaaggacagtgggtaactttgcctgcaccgctggacaccatcaatgtccatctgcgcgaaggctacatcataccacttcaaggtcctggactgaccactacagagtctagaaaacaaccaatggctcttgctgttgcactgactaaaagcggcgaagcaaggggtgagctgttctgggacgacggagagtcactggaggtactcgaacgaggcgcgtatacgcaggtcatttttgaggctcgcaataatacgatcgttaacgagctggtccacgtcacttcagaaggtgcaggccttcagttgggcaaggtaactgtcctgggagttgctacagcaccgcagcaggtcttgtccaacggacggcccgtaagcaactttacctatagtcctgataccaaagttctggacatctgcgttgctctgctgatgggtgagcagttcctggtatcatggtgc

SEQ ID NO: 22 - protein, 944 aa, synthetic construct
  REGION 1..944: note = Variant of the Homo Sapiens Lysosomal alpha-glucosidase
MEWSWVFLFFLSVTTGVHSGHILWHDFSTVPRELSGSSQVLEETHPAHQVGASRPGPRDAQLHPGRPRAVPTQCDVPGNSRFDCAPEKAITQEQCEARGCCYIPAKQGLQGAQMGQPWCFFPPSYPSYKLENLSQSEMGYTATLTRTTPSFFPKDILTLRLDVMMETENRLHFTIKDPANRRYEVPLETPHVHSRAPSPLYSVEFSEEPFGVIVRRQLDGRVLLNTTVAPLFFADQFLQLSTSLPSQYITGLAEHLSPLMLSTSWNKITLWNRDLAPTPGANLYGSHPFYLALEDGGSAHGVFLLNSNAMDVVLQPSPALSWRSTGGILDVYIFLGPEPKSVVQQYLDVVGYPFMPPYWGLGFHLCRWGYSSTAITRQVVENMTRAHFPLDVQWNDLDYMDSRRDFTFNKDGFRDFPAMVQELHQGGRRYMMIVDPGISSSGPAGSYRPYDEGLRRGVFITNETGQPLIGKVWPGSTAFPDFTNPEALAWWEDMVAEFHDQVPFDGMWIDMNEPSNFIRGSVDGCPNNELENPPYVPGVVGGTLQAATICASSHQFLSTHYNLHNLYGTTEAIASHRALVKARGTRPFVISRSTFAGHGRYAGHWTGDVWSSWEQLASSVPEILQFNLLGVPLVGADVCGFLGNTSEELCVRWTQLGAFYPFMRNHNSLTSLPQEPYSFSEPAQQAMRKALGLRYALLPHLYTLFHQAHVHGETVARPLFLEFPKDSSTWTVDHQMLWGEALLITPVLQPGKAEVTGYFPLGTWYDLQTVPVEALGSLPPPPAAPREPAIHSEGQWVTLPAPLDTINVHLREGYIIPLQGPGLTTTESRKQPMALAVALTKSGEARGELFWDDGESLEVLERGAYTQVIFEARNNTIVNELVHVTSEGAGLQLGKVTVLGVATAPQQVLSNGRPVSNFTYSPDTKVLDICVALLMGEQFLVSWC

SEQ ID NO: 23 - DNA, 2832 bp, synthetic construct
  misc_feature 1..2832: note = Variant of the Homo Sapiens Lysosomal alpha-glucosidase
  source 1..2832: mol_type = other DNA
atggaatggagctgggtctttctcttcttcctgtcagtaacgactggtgtccactccggacacattctgtggcatgatttttctaccgtgcctagagagctttccggttcaagtcaagtcctcgaagaaacacatccagcccatcaggttggcgcatctaggccgggccctcgggacgctcaactccacccagggagacctagggccgttcccactcagtgcgacgtgccagagaactcacgcttcgattgtgcacctgagaaggctatcacgcaagagcagtgcgaggcccgcggatgttgttacataccggctaaacaggggctgcagggtgcgcagatgggccaaccttggtgcttcttcccaccatcctatccgagttacaagctggagaatctctcccagtctgaaatgggatataccgcaacactgactcggaccaccccctccttctttcccaaagatatcttgactctgagacttgacgtaatgatggagacagaaaacaggctccactttaccattaaggaccctgccaatcgccgatacgaggtgcctctggaaacaccacacgtgcacagtagagctccatcacctctgtattctgtcgagttctccgaagagccgtttggcgttatcgtcaggaggcagctcgacgggcgagtgcttctgaacacgactgtggccccgttgttctttgcggatcagtttctgcaactgtcaacaagtctcccttctcagtacattaccgggcttgcagagcatctgtccccactcatgctgagtacttcatggaacaaaatcacactgtggaatagagaccttgctcctactccaggagccaacttgtatggttctcaccctttctacttggccctggaagatggcggatcagcgcatggcgtattcctcctgaattccaacgcaatggacgttgttcttcagccatctcctgctttgagttggagatctacaggcgggatactggacgtctacatctttctgggtccagagcctaaatccgtagtgcagcagtatcttgatgtcgtcggatacccgtttatgccaccatattggggcctggggttccacttgtgccgctggggatattcatccaccgccattacacgacaagttgttgagaatatgaccagggcacattttcctctggatgtacagtggaacgacctggactacatggatagtcgccgcgacttcaccttcaataaggatgggttcagagactttcctgctatggtccaagaacttcaccagggaggcaggaggtacatgatgatcgtagatccgggaatttcttcttctggcccagccggttcatacagaccgtatgacgaaggactgcgacgaggcgtctttatcacgaacgagactggtcagcctttgataggcaaggtttggccagggtccaccgctttcccggatttcacaaatcctgaggcactggcctggtgggaagatatggtcgccgagtttcacgaccaggtcccatttgacgggatgtggatcgacatgaacgagccatccaacttcattagaggaagtgtggatggctgtccgaataatgagctggaaaaccctccttacgtaccaggcgttgttggtgggactcttcaagctgcgacgatttgcgcatcctcccatcagttcctgtcaacccactataacttgcacaatctgtacgggacaacagaggctatcgccagtcatagggccctggtaaaagctagaggaacacgccctttcgttatctctcgctcaacttttgcaggccacggtaggtatgccggacattggaccggcgacgtctggagttcttgggaacagctggcttcctccgttccagagatattgcagtttaacctgttgggagtcccacttgtaggtgcagatgtttgtggcttcctggggaacacctcagaagaattgtgcgtaagatggactcaactgggcgccttctacccttttatgcgcaatcacaactcactgacatctttgcctcaagaaccgtactcatttagtgagccagcacagcaggccatgaggaaggctcttggcctgagatatgcacttctgccgcatctgtacacccttttccaccaggctcatgtccatggagagactgttgcacgacctctgttcttggagttcccaaaagactcttccacgtggacagtcgatcaccagatgctgtggggcgaggctctgctgattacacctgtattgcaacctggtaaggccgaagttaccgggtactttccattggggacctggtatgatctgcaaacagtcccggttgaagctcttggaagtcttccacctccacctgctgcaccaagggagcctgcgatccactctgaaggacagtgggtaactttgcctgcaccgctggacaccatcaatgtccatctgcgcgaaggctacatcataccacttcaaggtcctggactgaccactacagagtctagaaaacaaccaatggctcttgctgttgcactgactaaaagcggcgaagcaaggggtgagctgttctgggacgacggagagtcactggaggtactcgaacgaggcgcgtatacgcaggtcatttttgaggctcgcaataatacgatcgttaacgagctggtccacgtcacttcagaaggtgcaggccttcagttgtcgaaggtaactgtcctgggagttgctacagcaccgcagcaggtcttgtccaacggacggcccgtaagcaactttacctatagtcctgataccaaagttctggacatctgcgttgctctgctgatgggtgagcagttcctggtatcatggtgc

SEQ ID NO: 24 - protein, 944 aa, synthetic construct
  REGION 1..944: note = Variant of the Homo Sapiens Lysosomal alpha-glucosidase
MEWSWVFLFFLSVTTGVHSGHILWHDFSTVPRELSGSSQVLEETHPAHQVGASRPGPRDAQLHPGRPRAVPTQCDVPENSRFDCAPEKAITQEQCEARGCCYIPAKQGLQGAQMGQPWCFFPPSYPSYKLENLSQSEMGYTATLTRTTPSFFPKDILTLRLDVMMETENRLHFTIKDPANRRYEVPLETPHVHSRAPSPLYSVEFSEEPFGVIVRRQLDGRVLLNTTVAPLFFADQFLQLSTSLPSQYITGLAEHLSPLMLSTSWNKITLWNRDLAPTPGANLYGSHPFYLALEDGGSAHGVFLLNSNAMDVVLQPSPALSWRSTGGILDVYIFLGPEPKSVVQQYLDVVGYPFMPPYWGLGFHLCRWGYSSTAITRQVVENMTRAHFPLDVQWNDLDYMDSRRDFTFNKDGFRDFPAMVQELHQGGRRYMMIVDPGISSSGPAGSYRPYDEGLRRGVFITNETGQPLIGKVWPGSTAFPDFTNPEALAWWEDMVAEFHDQVPFDGMWIDMNEPSNFIRGSVDGCPNNELENPPYVPGVVGGTLQAATICASSHQFLSTHYNLHNLYGTTEAIASHRALVKARGTRPFVISRSTFAGHGRYAGHWTGDVWSSWEQLASSVPEILQFNLLGVPLVGADVCGFLGNTSEELCVRWTQLGAFYPFMRNHNSLTSLPQEPYSFSEPAQQAMRKALGLRYALLPHLYTLFHQAHVHGETVARPLFLEFPKDSSTWTVDHQMLWGEALLITPVLQPGKAEVTGYFPLGTWYDLQTVPVEALGSLPPPPAAPREPAIHSEGQWVTLPAPLDTINVHLREGYIIPLQGPGLTTTESRKQPMALAVALTKSGEARGELFWDDGESLEVLERGAYTQVIFEARNNTIVNELVHVTSEGAGLQLSKVTVLGVATAPQQVLSNGRPVSNFTYSPDTKVLDICVALLMGEQFLVSWC

SEQ ID NO: 25 - DNA, 2832 bp, synthetic construct
  misc_feature 1..2832: note = Variant of the Homo Sapiens Lysosomal alpha-glucosidase
  source 1..2832: mol_type = other DNA
atggaatggagctgggtctttctcttcttcctgtcagtaacgactggtgtccactccggacacattctgtggcatgatttttctgcggtgcctagagagctttccggttcaagtcaagtcctcgaagaaacacatccagcccatcaggttggcgcatctaggccgggccctcgggacgctcaactccacccagggagacctagggccgttcccactcagtgcgacgtgccagagaactcacgcttcgattgtgcacctgagaaggctatcacgcaagagcagtgcgaggcccgcggatgttgttacataccggctaaacaggggctgcagggtgcgcagatgggccaaccttggtgcttcttcccaccatcctatccgagttacaagctggagaatctctcccagtctgaaatgggatataccgcaacactgactcggaccaccccctccttctttcccaaagatatcttgactctgagacttgacgtaatgatggagacagaaaacaggctccactttaccattaaggaccctgccaatcgccgatacgaggtgcctctggaaacaccacacgtgcacagtagagctccatcacctctgtattctgtcgagttctccgaagagccgtttggcgttatcgtcaggaggcagctcgacgggcgagtgcttctgaacacgactgtggccccgttgttctttgcggatcagtttctgcaactgtcaacaagtctcccttctcagtacattaccgggcttgcagagcatctgtccccactcatgctgagtacttcatggaacaaaatcacactgtggaatagagaccttgctcctactccaggagccaacttgtatggttctcaccctttctacttggccctggaagatggcggatcagcgcatggcgtattcctcctgaattccaacgcaatggacgttgttcttcagccatctcctgctttgagttggagatctacaggcgggatactggacgtctacatctttctgggtccagagcctaaatccgtagtgcagcagtatcttgatgtcgtcggatacccgtttatgccaccatattggggcctggggttccacttgtgccgctggggatattcatccaccgccattacacgacaagttgttgagaatatgaccagggcacattttcctctggatgtacagtggaacgacctggactacatggatagtcgccgcgacttcaccttcaataaggatgggttcagagactttcctgctatggtccaagaacttcaccagggaggcaggaggtacatgatgatcgtagatccgggaatttcttcttctggcccagccggttcatacagaccgtatgacgaaggactgcgacgaggcgtctttatcacgaacgagactggtcagcctttgataggcaaggtttggccagggtccaccgctttcccggatttcacaaatcctgaggcactggcctggtgggaagatatggtcgccgagtttcacgaccaggtcccatttgacgggatgtggatcgacatgaacgagccatccaacttcattagaggaagtgtggatggctgtccgaataatgagctggaaaaccctccttacgtaccaggcgttgttggtgggactcttcaagctgcgacgatttgcgcatcctcccatcagttcctgtcaacccactataacttgcacaatctgtacgggacaacagaggctatcgccagtcatagggccctggtaaaagctagaggaacacgccctttcgttatctctcgctcaacttttgcaggccacggtaggtatgccggacattggaccggcgacgtctggagttcttgggaacagctggcttcctccgttccagagatattgcagtttaacctgttgggagtcccacttgtaggtgcagatgtttgtggcttcctggggaacacctcagaagaattgtgcgtaagatggactcaactgggcgccttctacccttttatgcgcaatcacaactcactgacatctttgcctcaagaaccgtactcatttagtgagccagcacagcaggccatgaggaaggctcttggcctgagatatgcacttctgccgcatctgtacacccttttccaccaggctcatgtccatggagagactgttgcacgacctctgttcttggagttcccaaaagactcttccacgtggacagtcgatcaccagatgctgtggggcgaggctctgctgattacacctgtattgcaacctggtaaggccgaagttaccgggtactttccattggggacctggtatgatctgcaaacagtcccggttgaagctcttggaagtcttccacctccacctgctgcaccaagggagcctgcgatccactctgaaggacagtgggtaactttgcctgcaccgctggacaccatcaatgtccatctgcgcgaaggctacatcataccacttcaaggtcctggactgaccactacagagtctagaaaacaaccaatggctcttgctgttgcactgactaaaagcggcgaagcaaggggtgagctgttctgggacgacggagagtcactggaggtactcgaacgaggcgcgtatacgcaggtcatttttgaggctcgcaataatacgatcgttaacgagctggtccacgtcacttcagaaggtgcaggccttcagttgggcaaggtaactgtcctgggagttgctacagcaccgcagcaggtcttgtccaacggacggcccgtaagcaactttacctatagtcctgataccaaagttctggacatctgcgttgctctgctgatgggtgagcagttcctggtatcatggtgc

SEQ ID NO: 26 - protein, 944 aa, synthetic construct
  REGION 1..944: note = Variant of the Homo Sapiens Lysosomal alpha-glucosidase
MEWSWVFLFFLSVTTGVHSGHILWHDFSAVPRELSGSSQVLEETHPAHQVGASRPGPRDAQLHPGRPRAVPTQCDVPENSRFDCAPEKAITQEQCEARGCCYIPAKQGLQGAQMGQPWCFFPPSYPSYKLENLSQSEMGYTATLTRTTPSFFPKDILTLRLDVMMETENRLHFTIKDPANRRYEVPLETPHVHSRAPSPLYSVEFSEEPFGVIVRRQLDGRVLLNTTVAPLFFADQFLQLSTSLPSQYITGLAEHLSPLMLSTSWNKITLWNRDLAPTPGANLYGSHPFYLALEDGGSAHGVFLLNSNAMDVVLQPSPALSWRSTGGILDVYIFLGPEPKSVVQQYLDVVGYPFMPPYWGLGFHLCRWGYSSTAITRQVVENMTRAHFPLDVQWNDLDYMDSRRDFTFNKDGFRDFPAMVQELHQGGRRYMMIVDPGISSSGPAGSYRPYDEGLRRGVFITNETGQPLIGKVWPGSTAFPDFTNPEALAWWEDMVAEFHDQVPFDGMWIDMNEPSNFIRGSVDGCPNNELENPPYVPGVVGGTLQAATICASSHQFLSTHYNLHNLYGTTEAIASHRALVKARGTRPFVISRSTFAGHGRYAGHWTGDVWSSWEQLASSVPEILQFNLLGVPLVGADVCGFLGNTSEELCVRWTQLGAFYPFMRNHNSLTSLPQEPYSFSEPAQQAMRKALGLRYALLPHLYTLFHQAHVHGETVARPLFLEFPKDSSTWTVDHQMLWGEALLITPVLQPGKAEVTGYFPLGTWYDLQTVPVEALGSLPPPPAAPREPAIHSEGQWVTLPAPLDTINVHLREGYIIPLQGPGLTTTESRKQPMALAVALTKSGEARGELFWDDGESLEVLERGAYTQVIFEARNNTIVNELVHVTSEGAGLQLGKVTVLGVATAPQQVLSNGRPVSNFTYSPDTKVLDICVALLMGEQFLVSWC

SEQ ID NO: 27 - DNA, 2832 bp, synthetic construct
  misc_feature 1..2832: note = Variant of the Homo Sapiens Lysosomal alpha-glucosidase
  source 1..2832: mol_type = other DNA
atggaatggagctgggtctttctcttcttcctgtcagtaacgactggtgtccactccggacacattctgtggcatgatttttctaccgtgcctagagagctttccggttcaagtcaagtcctcgaagaaacacatccagcccatcaggttggcgcatctaggccgggccctcgggacgctcaactccacccagggagacctagggccgttcccactcagtgcgacgtgccagagaactcacgcttcgattgtgcacctgagaaggctatcacgcaagagcagtgcgaggcccgcggatgttgttacataccggctaaacaggggctgcagggtgcgcagatgggccaaccttggtgcttcttcccaccatcctatccgagttacaagctggagaatctctcccagtctgaaatgggatataccgcaacactgactcggaccaccccctccttctttcccaaagatatcttgactctgagacttgacgtaatgatggagacagaaaacaggctccactttaccattaaggaccctgccaatcgccgatacgaggtgcctctggaaacaccacacgtgcacagtagagctccatcacctctgtattctgtcgagttctccgaagagccgtttggcgttatcgtcaggaggcagctcgacgggcgagtgcttctgaacacgactgtggccccgttgttctttgcggatcagtttctgcaactgtcaacaagtctcccttctcagtacattaccgggcttgcagagcatctgtccccactcatgctgagtacttcatggaacaaaatcacactgtggaatagagaccttgctcctactccaggagccaacttgtatggttctcaccctttctacttggccctggaagatggcggatcagcgcatggcgtattcctcctgaattccaacgcaatggacgttgttcttcagccatctcctgctttgagttggagatctacaggcgggatactggacgtctacatctttctgggtccagagcctaaatccgtagtgcagcagtatcttgatgtcgtcggatacccgtttatgccaccatattggggcctggggttccacttgtgccgctggggatattcatccaccgccattacacgacaagttgttgagaatatgaccagggcacattttcctctggatgtacagtggaacgacctggactacatggatagtcgccgcgacttcaccttcaataaggatgggttcagagactttcctgctatggtccaagaacttcaccagggaggcaggaggtacatgatgatcgtagatccgggaatttcttcttctggcccagccggttcatacagaccgtatgacgaaggactgcgacgaggcgtctttatcacgaacgagactggtcagcctttgataggcaaggtttggccagggtccaccgctttcccggatttcacaaatcctgaggcactggcctggtgggaagatatggtcgccgagtttcacgaccaggtcccatttgacgggatgtggatcgacatgaacgagccatccaacttcattagaggaagtgtggatggctgtccgaataatgagctggaaaaccctccttacgtaccaggcgttgttggtgggactcttcaagctgcgacgatttgcgcatcctcccatcagttcctgtcaacccactataacttgcacaatctgtacgggacaacagaggctatcgccagtcatagggccctggtaaaagctagaggaacacgccctttcgttatctctcgctcaacttttgcaggccacggtaggtatgccggacattggaccggcgacgtctggagttcttgggaacagctggcttcctccgttccagagatattgcagtttaacctgttgggagtcccacttgtaggtgcagatgtttgtggcttcctggggaacacctcagaagaattgtgcgtaagatggactcaactgggcgccttctacccttttatgcgcaatcacaactcactgacatctttgcctcaagaaccgtactcatttagtgagccagcacagcaggccatgaggaaggctcttggcctgagatatgcacttctgccgcatctgtacacccttttccaccaggctcatgtccatggagagactgttgcacgacctctgttcttggagttcccaaaagactcttccacgtggacagtcgatcaccagatgctgtggggcgaggctctgctgattacacctgtattgcaacctggtaaggccgaagttaccgggtactttccattggggacctggtatgatctgcaaacagtcccggttgaagctcttggaagtcttccacctccacctgctgcaccaagggagcctgcgatccactctgaaggacagtgggtaactttgcctgcaccgctggacaccatcaatgtccatctgcgcgaaggctacatcataccacttcaaggtcctggactgaccactacagagtctagaaaacaaccaatggctcttgctgttgcactgactaaagggggcgaagcaaggggtgagctgttctgggacgacggagagtcactggaggtactcgaacgaggcgcgtatacgcaggtcatttttgaggctcgcaataatacgatcgttaacgagctggtccacgtcacttcagaaggtgcaggccttcagttgggcaaggtaactgtcctgggagttgctacagcaccgcagcaggtcttgtccaacggacggcccgtaagcaactttacctatagtcctgataccaaagttctggacatctgcgttgctctgctgatgggtgagcagttcctggtatcatggtgc

SEQ ID NO: 28 - protein, 944 aa, synthetic construct
  REGION 1..944: note = Variant of the Homo Sapiens Lysosomal alpha-glucosidase
MEWSWVFLFFLSVTTGVHSGHILWHDFSTVPRELSGSSQVLEETHPAHQVGASRPGPRDAQLHPGRPRAVPTQCDVPENSRFDCAPEKAITQEQCEARGCCYIPAKQGLQGAQMGQPWCFFPPSYPSYKLENLSQSEMGYTATLTRTTPSFFPKDILTLRLDVMMETENRLHFTIKDPANRRYEVPLETPHVHSRAPSPLYSVEFSEEPFGVIVRRQLDGRVLLNTTVAPLFFADQFLQLSTSLPSQYITGLAEHLSPLMLSTSWNKITLWNRDLAPTPGANLYGSHPFYLALEDGGSAHGVFLLNSNAMDVVLQPSPALSWRSTGGILDVYIFLGPEPKSVVQQYLDVVGYPFMPPYWGLGFHLCRWGYSSTAITRQVVENMTRAHFPLDVQWNDLDYMDSRRDFTFNKDGFRDFPAMVQELHQGGRRYMMIVDPGISSSGPAGSYRPYDEGLRRGVFITNETGQPLIGKVWPGSTAFPDFTNPEALAWWEDMVAEFHDQVPFDGMWIDMNEPSNFIRGSVDGCPNNELENPPYVPGVVGGTLQAATICASSHQFLSTHYNLHNLYGTTEAIASHRALVKARGTRPFVISRSTFAGHGRYAGHWTGDVWSSWEQLASSVPEILQFNLLGVPLVGADVCGFLGNTSEELCVRWTQLGAFYPFMRNHNSLTSLPQEPYSFSEPAQQAMRKALGLRYALLPHLYTLFHQAHVHGETVARPLFLEFPKDSSTWTVDHQMLWGEALLITPVLQPGKAEVTGYFPLGTWYDLQTVPVEALGSLPPPPAAPREPAIHSEGQWVTLPAPLDTINVHLREGYIIPLQGPGLTTTESRKQPMALAVALTKGGEARGELFWDDGESLEVLERGAYTQVIFEARNNTIVNELVHVTSEGAGLQLGKVTVLGVATAPQQVLSNGRPVSNFTYSPDTKVLDICVALLMGEQFLVSWC

SEQ ID NO: 29 - DNA, 2832 bp, synthetic construct
  misc_feature 1..2832: note = Variant of the Homo Sapiens Lysosomal alpha-glucosidase
  source 1..2832: mol_type = other DNA
atggaatggagctgggtctttctcttcttcctgtcagtaacgactggtgtccactccggacacattctgtggcatgatttttctaccgtgcctagagagctttccggttcaagtcaagtcctcgaagaaacacatccagcccatcaggttggcgcatctaggccgggccctcgggacgctcaatcgcacccagggagacctagggccgttcccactcagtgcgacgtgccagagaactcacgcttcgattgtgcacctgagaaggctatcacgcaagagcagtgcgaggcccgcggatgttgttacataccggctaaacaggggctgcagggtgcgcagatgggccaaccttggtgcttcttcccaccatcctatccgagttacaagctggagaatctctcccagtctgaaatgggatataccgcaacactgactcggaccaccccctccttctttcccaaagatatcttgactctgagacttgacgtaatgatggagacagaaaacaggctccactttaccattaaggaccctgccaatcgccgatacgaggtgcctctggaaacaccacacgtgcacagtagagctccatcacctctgtattctgtcgagttctccgaagagccgtttggcgttatcgtcaggaggcagctcgacgggcgagtgcttctgaacacgactgtggccccgttgttctttgcggatcagtttctgcaactgtcaacaagtctcccttctcagtacattaccgggcttgcagagcatctgtccccactcatgctgagtacttcatggaacaaaatcacactgtggaatagagaccttgctcctactccaggagccaacttgtatggttctcaccctttctacttggccctggaagatggcggatcagcgcatggcgtattcctcctgaattccaacgcaatggacgttgttcttcagccatctcctgctttgagttggagatctacaggcgggatactggacgtctacatctttctgggtccagagcctaaatccgtagtgcagcagtatcttgatgtcgtcggatacccgtttatgccaccatattggggcctggggttccacttgtgccgctggggatattcatccaccgccattacacgacaagttgttgagaatatgaccagggcacattttcctctggatgtacagtggaacgacctggactacatggatagtcgccgcgacttcaccttcaataaggatgggttcagagactttcctgctatggtccaagaacttcaccagggaggcaggaggtacatgatgatcgtagatccgggaatttcttcttctggcccagccggttcatacagaccgtatgacgaaggactgcgacgaggcgtctttatcacgaacgagactggtcagcctttgataggcaaggtttggccagggtccaccgctttcccggatttcacaaatcctgaggcactggcctggtgggaagatatggtcgccgagtttcacgaccaggtcccatttgacgggatgtggatcgacatgaacgagccatccaacttcattagaggaagtgtggatggctgtccgaataatgagctggaaaaccctccttacgtaccaggcgttgttggtgggactcttcaagctgcgacgatttgcgcatcctcccatcagttcctgtcaacccactataacttgcacaatctgtacgggacaacagaggctatcgccagtcatagggccctggtaaaagctagaggaacacgccctttcgttatctctcgctcaacttttgcaggccacggtaggtatgccggacattggaccggcgacgtctggagttcttgggaacagctggcttcctccgttccagagatattgcagtttaacctgttgggagtcccacttgtaggtgcagatgtttgtggcttcctggggaacacctcagaagaattgtgcgtaagatggactcaactgggcgccttctacccttttatgcgcaatcacaactcactgacatctttgcctcaagaaccgtactcatttagtgagccagcacagcaggccatgaggaaggctcttggcctgagatatgcacttctgccgcatctgtacacccttttccaccaggctcatgtccatggagagactgttgcacgacctctgttcttggagttcccaaaagactcttccacgtggacagtcgatcaccagatgctgtggggcgaggctctgctgattacacctgtattgcaacctggtaaggccgaagttaccgggtactttccattggggacctggtatgatctgcaaacagtcccggttgaagctcttggaagtcttccacctccacctgctgcaccaagggagcctgcgatccactctgaaggacagtgggtaactttgcctgcaccgctggacaccatcaatgtccatctgcgcgaaggctacatcataccacttcaaggtcctggactgaccactacagagtctagaaaacaaccaatggctcttgctgttgcactgactaaaagcggcgaagcaaggggtgagctgttctgggacgacggagagtcactggaggtactcgaacgaggcgcgtatacgcaggtcatttttgaggctcgcaataatacgatcgttaacgagctggtccacgtcacttcagaaggtgcaggccttcagttgggcaaggtaactgtcctgggagttgctacagcaccgcagcaggtcttgtccaacggacggcccgtaagcaactttacctatagtcctgataccaaagttctggacatctgcgttgctctgctgatgggtgagcagttcctggtatcatggtgc

SEQ ID NO: 30 - protein, 944 aa, synthetic construct
  REGION 1..944: note = Variant of the Homo Sapiens Lysosomal alpha-glucosidase
MEWSWVFLFFLSVTTGVHSGHILWHDFSTVPRELSGSSQVLEETHPAHQVGASRPGPRDAQSHPGRPRAVPTQCDVPENSRFDCAPEKAITQEQCEARGCCYIPAKQGLQGAQMGQPWCFFPPSYPSYKLENLSQSEMGYTATLTRTTPSFFPKDILTLRLDVMMETENRLHFTIKDPANRRYEVPLETPHVHSRAPSPLYSVEFSEEPFGVIVRRQLDGRVLLNTTVAPLFFADQFLQLSTSLPSQYITGLAEHLSPLMLSTSWNKITLWNRDLAPTPGANLYGSHPFYLALEDGGSAHGVFLLNSNAMDVVLQPSPALSWRSTGGILDVYIFLGPEPKSVVQQYLDVVGYPFMPPYWGLGFHLCRWGYSSTAITRQVVENMTRAHFPLDVQWNDLDYMDSRRDFTFNKDGFRDFPAMVQELHQGGRRYMMIVDPGISSSGPAGSYRPYDEGLRRGVFITNETGQPLIGKVWPGSTAFPDFTNPEALAWWEDMVAEFHDQVPFDGMWIDMNEPSNFIRGSVDGCPNNELENPPYVPGVVGGTLQAATICASSHQFLSTHYNLHNLYGTTEAIASHRALVKARGTRPFVISRSTFAGHGRYAGHWTGDVWSSWEQLASSVPEILQFNLLGVPLVGADVCGFLGNTSEELCVRWTQLGAFYPFMRNHNSLTSLPQEPYSFSEPAQQAMRKALGLRYALLPHLYTLFHQAHVHGETVARPLFLEFPKDSSTWTVDHQMLWGEALLITPVLQPGKAEVTGYFPLGTWYDLQTVPVEALGSLPPPPAAPREPAIHSEGQWVTLPAPLDTINVHLREGYIIPLQGPGLTTTESRKQPMALAVALTKSGEARGELFWDDGESLEVLERGAYTQVIFEARNNTIVNELVHVTSEGAGLQLGKVTVLGVATAPQQVLSNGRPVSNFTYSPDTKVLDICVALLMGEQFLVSWC

SEQ ID NO: 31 - DNA, 2832 bp, synthetic construct
  misc_feature 1..2832: note = Variant of the Homo Sapiens Lysosomal alpha-glucosidase
  source 1..2832: mol_type = other DNA
atggaatggagctgggtctttctcttcttcctgtcagtaacgactggtgtccactccggacacattctgtggcatgatttttctaccgtgcctagagagctttccggttcaagtcaagtcctcgaagaaacacatccagcccatcaggttggcgcatctaggccgggccctcgggacgctcaactccacccagggagacctagggccgttcccactcagtgcgacgtgccagagaactcacgcttcgattgtgcacctgagaaggctatcacgcaagagcagtgcgaggcccgcggatgttgttacataccggctaaacaggggctgcagggtgcgcagatgggccaaccttggtgcttcttcccaccatcctatccgagttacaagctggagaatctctcccagtctgaaatgggatataccgcaacactgactcggaccaccccctccttctttcccaaagatatcttgactctgagacttgacgtaatgatggagacagaaaacaggctccactttaccattaaggaccctgccaatcgccgatacgaggtgcctctggaaacaccacacgtgcacagtagagctccatcacctctgtattctgtcgagttctccgaagagccgtttggcgttatcgtcaggaggcagctcgacgggcgagtgcttctgaacacgactgtggccccgttgttctttgcggatcagtttctgcaactgtcaacaagtctcccttctcagtacattaccgggcttgcagagcatctgtccccactcatgctgagtacttcatggaacaaaatcacactgtggaatagagaccttgctcctactccaggagccaacttgtatggttctcaccctttctacttggccctggaagatggcggatcagcgcatggcgtattcctcctgaattccaacgcaatggacgttgttcttcagccatctcctgctttgagttggagatctacaggcgggatactggacgtctacatctttctgggtccagagcctaaatccgtagtgcagcagtatcttgatgtcgtcggatacccgtttatgccaccatattggggcctggggttccacttgtgccgctggggatattcatccaccgccattacacgacaagttgttgagaatatgaccagggcacattttcctctggatgtacagtggaacgacctggactacatggatagtcgccgcgacttcaccttcaataaggatgggttcagagactttcctgctatggtccaagaacttcaccagggaggcaggaggtacatgatgatcgtagatccgggaatttcttcttctggcccagccggttcatacagaccgtatgacgaaggactgcgacgaggcgtctttatcacgaacgagactggtcagcctttgataggcaaggtttggccagggtccaccgctttcccggatttcacaaatcctgaggcactggcctggtgggaagatatggtcgccgagtttcacgaccaggtcccatttgacgggatgtggatcgacatgaacgagccatccaacttcattagaggaagtgtggatggctgtccgaataatgagctggaaaaccctccttacgtaccaggcgttgttggtgggactcttcaagctgcgacgatttgcgcatcctcccatcagttcctgtcaacccactataacttgcacaatctgtacgggacaacagaggctatcgccagtcatagggccctggtaaaagctagaggaacacgccctttcgttatctctcgctcaacttttgcaggccacggtaggtatgccggacattggaccggcgacgtctggagttcttgggaacagctggcttcctccgttccagagatattgcagtttaacctgttgggagtcccacttgtaggtgcagatgtttgtggcttcctggggaacacctcagaagaattgtgcgtaagatggactcaactgggcgccttctacccttttatgcgcaatcacaactcactgacatctttgcctcaagaaccgtactcatttagtgagccagcacagcaggccatgaggaaggctcttggcctgagatatgcacttctgccgcatctgtacacccttttccaccaggctcatgtccatggagagactgttgcacgacctctgttcttggagttcccaaaagactcttccacgtggacagtcgatcaccagatgctgtggggcgaggctctgctgattacacctgtattgcaacctggtaaggccgaagttaccgggtactttccattggggacctggtatgatctgcaaacagtcccggttgaagctcttggaagtcttccacctccacctgctgcaccaagggagcctgcgatccactctgaaggacagtgggtaactttgcctgcaccgctggacaccatcaatgtccatctgcgcgaaggctacatcataccacttcaaggtcctggactgaccactacagagtctagaaaacaaccaatggctcttgctgttgcactgactaaaagcggcgaagcaaggggtgagctgttctgggacgacggagagtcactggaggtactcgaacgaggcgcgtatacgcaggtcatttttgaggctcgcaataatacgatcgttaacgagctggtccacgtcacttcagaaggtgcaggccttcagttgggcaaggtaactgtcctgggagttgctacagcaccgcagcaggtcttgtccaacggacggcccgtaagcaactttacctatagtcctgataccaaagttctggacatctgcgttaggctgctgatgggtgagcagttcctggtatcatggtgc

SEQ ID NO: 32 - protein, 944 aa, synthetic construct
  REGION 1..944: note = Variant of the Homo Sapiens Lysosomal alpha-glucosidase
MEWSWVFLFFLSVTTGVHSGHILWHDFSTVPRELSGSSQVLEETHPAHQVGASRPGPRDAQLHPGRPRAVPTQCDVPENSRFDCAPEKAITQEQCEARGCCYIPAKQGLQGAQMGQPWCFFPPSYPSYKLENLSQSEMGYTATLTRTTPSFFPKDILTLRLDVMMETENRLHFTIKDPANRRYEVPLETPHVHSRAPSPLYSVEFSEEPFGVIVRRQLDGRVLLNTTVAPLFFADQFLQLSTSLPSQYITGLAEHLSPLMLSTSWNKITLWNRDLAPTPGANLYGSHPFYLALEDGGSAHGVFLLNSNAMDVVLQPSPALSWRSTGGILDVYIFLGPEPKSVVQQYLDVVGYPFMPPYWGLGFHLCRWGYSSTAITRQVVENMTRAHFPLDVQWNDLDYMDSRRDFTFNKDGFRDFPAMVQELHQGGRRYMMIVDPGISSSGPAGSYRPYDEGLRRGVFITNETGQPLIGKVWPGSTAFPDFTNPEALAWWEDMVAEFHDQVPFDGMWIDMNEPSNFIRGSVDGCPNNELENPPYVPGVVGGTLQAATICASSHQFLSTHYNLHNLYGTTEAIASHRALVKARGTRPFVISRSTFAGHGRYAGHWTGDVWSSWEQLASSVPEILQFNLLGVPLVGADVCGFLGNTSEELCVRWTQLGAFYPFMRNHNSLTSLPQEPYSFSEPAQQAMRKALGLRYALLPHLYTLFHQAHVHGETVARPLFLEFPKDSSTWTVDHQMLWGEALLITPVLQPGKAEVTGYFPLGTWYDLQTVPVEALGSLPPPPAAPREPAIHSEGQWVTLPAPLDTINVHLREGYIIPLQGPGLTTTESRKQPMALAVALTKSGEARGELFWDDGESLEVLERGAYTQVIFEARNNTIVNELVHVTSEGAGLQLGKVTVLGVATAPQQVLSNGRPVSNFTYSPDTKVLDICVRLLMGEQFLVSWC

SEQ ID NO: 33 - DNA, 2832 bp, synthetic construct
  misc_feature 1..2832: note = Variant of the Homo Sapiens Lysosomal alpha-glucosidase
  source 1..2832: mol_type = other DNA
atggaatggagctgggtctttctcttcttcctgtcagtaacgactggtgtccactccggacacattctgtggcatgattttgcgaccgtgcctagagagctttccggttcaagtcaagtcctcgaagaaacacatccagcccatcaggttggcgcatctaggccgggccctcgggacgctcaactccacccagggagacctagggccgttcccactcagtgcgacgtgccagagaactcacgcttcgattgtgcacctgagaaggctatcacgcaagagcagtgcgaggcccgcggatgttgttacataccggctaaacaggggctgcagggtgcgcagatgggccaaccttggtgcttcttcccaccatcctatccgagttacaagctggagaatctctcccagtctgaaatgggatataccgcaacactgactcggaccaccccctccttctttcccaaagatatcttgactctgagacttgacgtaatgatggagacagaaaacaggctccactttaccattaaggaccctgccaatcgccgatacgaggtgcctctggaaacaccacacgtgcacagtagagctccatcacctctgtattctgtcgagttctccgaagagccgtttggcgttatcgtcaggaggcagctcgacgggcgagtgcttctgaacacgactgtggccccgttgttctttgcggatcagtttctgcaactgtcaacaagtctcccttctcagtacattaccgggcttgcagagcatctgtccccactcatgctgagtacttcatggaacaaaatcacactgtggaatagagaccttgctcctactccaggagccaacttgtatggttctcaccctttctacttggccctggaagatggcggatcagcgcatggcgtattcctcctgaattccaacgcaatggacgttgttcttcagccatctcctgctttgagttggagatctacaggcgggatactggacgtctacatctttctgggtccagagcctaaatccgtagtgcagcagtatcttgatgtcgtcggatacccgtttatgccaccatattggggcctggggttccacttgtgccgctggggatattcatccaccgccattacacgacaagttgttgagaatatgaccagggcacattttcctctggatgtacagtggaacgacctggactacatggatagtcgccgcgacttcaccttcaataaggatgggttcagagactttcctgctatggtccaagaacttcaccagggaggcaggaggtacatgatgatcgtagatccgggaatttcttcttctggcccagccggttcatacagaccgtatgacgaaggactgcgacgaggcgtctttatcacgaacgagactggtcagcctttgataggcaaggtttggccagggtccaccgctttcccggatttcacaaatcctgaggcactggcctggtgggaagatatggtcgccgagtttcacgaccaggtcccatttgacgggatgtggatcgacatgaacgagccatccaacttcattagaggaagtgtggatggctgtccgaataatgagctggaaaaccctccttacgtaccaggcgttgttggtgggactcttcaagctgcgacgatttgcgcatcctcccatcagttcctgtcaacccactataacttgcacaatctgtacgggacaacagaggctatcgccagtcatagggccctggtaaaagctagaggaacacgccctttcgttatctctcgctcaacttttgcaggccacggtaggtatgccggacattggaccggcgacgtctggagttcttgggaacagctggcttcctccgttccagagatattgcagtttaacctgttgggagtcccacttgtaggtgcagatgtttgtggcttcctggggaacacctcagaagaattgtgcgtaagatggactcaactgggcgccttctacccttttatgcgcaatcacaactcactgacatctttgcctcaagaaccgtactcatttagtgagccagcacagcaggccatgaggaaggctcttggcctgagatatgcacttctgccgcatctgtacacccttttccaccaggctcatgtccatggagagactgttgcacgacctctgttcttggagttcccaaaagactcttccacgtggacagtcgatcaccagatgctgtggggcgaggctctgctgattacacctgtattgcaacctggtaaggccgaagttaccgggtactttccattggggacctggtatgatctgcaaacagtcccggttgaagctcttggaagtcttccacctccacctgctgcaccaagggagcctgcgatccactctgaaggacagtgggtaactttgcctgcaccgctggacaccatcaatgtccatctgcgcgaaggctacatcataccacttcaaggtcctggactgaccactacagagtctagaaaacaaccaatggctcttgctgttgcactgactaaaagcggcgaagcaaggggtgagctgttctgggacgacggagagtcactggaggtactcgaacgaggcgcgtatacgcaggtcatttttgaggctcgcaataatacgatcgttaacgagctggtccacgtcacttcagaaggtgcaggccttcagttgggcaaggtaactgtcctgggagttgctacagcaccgcagcaggtcttgtccaacggacggcccgtaagcaactttacctatagtcctgataccaaagttctggacatctgcgttgctctgctgatgggtgagcagttcctggtatcatggtgc

SEQ ID NO: 34 - protein, 944 aa, synthetic construct
  REGION 1..944: note = Variant of the Homo Sapiens Lysosomal alpha-glucosidase
MEWSWVFLFFLSVTTGVHSGHILWHDFATVPRELSGSSQVLEETHPAHQVGASRPGPRDAQLHPGRPRAVPTQCDVPENSRFDCAPEKAITQEQCEARGCCYIPAKQGLQGAQMGQPWCFFPPSYPSYKLENLSQSEMGYTATLTRTTPSFFPKDILTLRLDVMMETENRLHFTIKDPANRRYEVPLETPHVHSRAPSPLYSVEFSEEPFGVIVRRQLDGRVLLNTTVAPLFFADQFLQLSTSLPSQYITGLAEHLSPLMLSTSWNKITLWNRDLAPTPGANLYGSHPFYLALEDGGSAHGVFLLNSNAMDVVLQPSPALSWRSTGGILDVYIFLGPEPKSVVQQYLDVVGYPFMPPYWGLGFHLCRWGYSSTAITRQVVENMTRAHFPLDVQWNDLDYMDSRRDFTFNKDGFRDFPAMVQELHQGGRRYMMIVDPGISSSGPAGSYRPYDEGLRRGVFITNETGQPLIGKVWPGSTAFPDFTNPEALAWWEDMVAEFHDQVPFDGMWIDMNEPSNFIRGSVDGCPNNELENPPYVPGVVGGTLQAATICASSHQFLSTHYNLHNLYGTTEAIASHRALVKARGTRPFVISRSTFAGHGRYAGHWTGDVWSSWEQLASSVPEILQFNLLGVPLVGADVCGFLGNTSEELCVRWTQLGAFYPFMRNHNSLTSLPQEPYSFSEPAQQAMRKALGLRYALLPHLYTLFHQAHVHGETVARPLFLEFPKDSSTWTVDHQMLWGEALLITPVLQPGKAEVTGYFPLGTWYDLQTVPVEALGSLPPPPAAPREPAIHSEGQWVTLPAPLDTINVHLREGYIIPLQGPGLTTTESRKQPMALAVALTKSGEARGELFWDDGESLEVLERGAYTQVIFEARNNTIVNELVHVTSEGAGLQLGKVTVLGVATAPQQVLSNGRPVSNFTYSPDTKVLDICVALLMGEQFLVSWC

SEQ ID NO: 35 - DNA, 2832 bp, synthetic construct
  misc_feature 1..2832: note = Variant of the Homo Sapiens Lysosomal alpha-glucosidase
  source 1..2832: mol_type = other DNA
atggaatggagctgggtctttctcttcttcctgtcagtaacgactggtgtccactccggacacattctgtggcatgatttttctaccgtgcctagagagctttccggttcaagtcaagtcctcgaagaaacacatccagcccatcaggttggcgcatctaggccgggccctcgggacgctcaactccacccagggagacctagggccgttcccactcagtgcgacgtgccagagaactcacgcttcgattgtgcacctgagaaggctatcacgcaagagcagtgcgaggcccgcggatgttgttacataccggctaaacaggggctgcagggtgcgcagatgggccaaccttggtgcttcttcccaccatcctatccgagttacaagctggagaatctctcccagtctgaaatgggatataccgcaacactgactcggaccaccccctccttctttcccaaagatatcttgactctgagacttgacgtaatgatggagacagaaaacaggctccactttaccattaaggaccctgccaatcgccgatacgaggtgcctctggaaacaccacacgtgcacagtagagctccatcacctctgtattctgtcgagttctccgaagagccgtttggcgttatcgtcaggaggcagctcgacgggcgagtgcttctgaacacgactgtggccccgttgttctttgcggatcagtttctgcaactgtcaacaagtctcccttctcagtacattaccgggcttgcagagcatctgtccccactcatgctgagtacttcatggaacaaaatcacactgtggaatagagaccttgctcctactccaggagccaacttgtatggttctcaccctttctacttggccctggaagatggcggatcagcgcatggcgtattcctcctgaattccaacgcaatggacgttgttcttcagccatctcctgctttgagttggagatctacaggcgggatactggacgtctacatctttctgggtccagagcctaaatccgtagtgcagcagtatcttgatgtcgtcggatacccgtttatgccaccatattggggcctggggttccacttgtgccgctggggatattcatccaccgccattacacgacaagttgttgagaatatgaccagggcacattttcctctggatgtacagtggaacgacctggactacatggatagtcgccgcgacttcaccttcaataaggatgggttcagagactttcctgctatggtccaagaacttcaccagggaggcaggaggtacatgatgatcgtagatccgggaatttcttcttctggcccagccggttcatacagaccgtatgacgaaggactgcgacgaggcgtctttatcacgaacgagactggtcagcctttgataggcaaggtttggccagggtccaccgctttcccggatttcacaaatcctgaggcactggcctggtgggaagatatggtcgccgagtttcacgaccaggtcccatttgacgggatgtggatcgacatgaacgagccatccaacttcattagaggaagtgtggatggctgtccgaataatgagctggaaaaccctccttacgtaccaggcgttgttggtgggactcttcaagctgcgacgatttgcgcatcctcccatcagttcctgtcaacccactataacttgcacaatctgtacggggcgacagaggctatcgccagtcatagggccctggtaaaagctagaggaacacgccctttcgttatctctcgctcaacttttgcaggccacggtaggtatgccggacattggaccggcgacgtctggagttcttgggaacagctggcttcctccgttccagagatattgcagtttaacctgttgggagtcccacttgtaggtgcagatgtttgtggcttcctggggaacacctcagaagaattgtgcgtaagatggactcaactgggcgccttctacccttttatgcgcaatcacaactcactgacatctttgcctcaagaaccgtactcatttagtgagccagcacagcaggccatgaggaaggctcttggcctgagatatgcacttctgccgcatctgtacacccttttccaccaggctcatgtccatggagagactgttgcacgacctctgttcttggagttcccaaaagactcttccacgtggacagtcgatcaccagatgctgtggggcgaggctctgctgattacacctgtattgcaacctggtaaggccgaagttaccgggtactttccattggggacctggtatgatctgcaaacagtcccggttgaagctcttggaagtcttccacctccacctgctgcaccaagggagcctgcgatccactctgaaggacagtgggtaactttgcctgcaccgctggacaccatcaatgtccatctgcgcgaaggctacatcataccacttcaaggtcctggactgaccactacagagtctagaaaacaaccaatggctcttgctgttgcactgactaaaagcggcgaagcaaggggtgagctgttctgggacgacggagagtcactggaggtactcgaacgaggcgcgtatacgcaggtcatttttgaggctcgcaataatacgatcgttaacgagctggtccacgtcacttcagaaggtgcaggccttcagttgggcaaggtaactgtcctgggagttgctacagcaccgcagcaggtcttgtccaacggacggcccgtaagcaactttacctatagtcctgataccaaagttctggacatctgcgttgctctgctgatgggtgagcagttcctggtatcatggtgc

SEQ ID NO: 36 - protein, 944 aa, synthetic construct
  REGION 1..944: note = Variant of the Homo Sapiens Lysosomal alpha-glucosidase
MEWSWVFLFFLSVTTGVHSGHILWHDFSTVPRELSGSSQVLEETHPAHQVGASRPGPRDAQLHPGRPRAVPTQCDVPENSRFDCAPEKAITQEQCEARGCCYIPAKQGLQGAQMGQPWCFFPPSYPSYKLENLSQSEMGYTATLTRTTPSFFPKDILTLRLDVMMETENRLHFTIKDPANRRYEVPLETPHVHSRAPSPLYSVEFSEEPFGVIVRRQLDGRVLLNTTVAPLFFADQFLQLSTSLPSQYITGLAEHLSPLMLSTSWNKITLWNRDLAPTPGANLYGSHPFYLALEDGGSAHGVFLLNSNAMDVVLQPSPALSWRSTGGILDVYIFLGPEPKSVVQQYLDVVGYPFMPPYWGLGFHLCRWGYSSTAITRQVVENMTRAHFPLDVQWNDLDYMDSRRDFTFNKDGFRDFPAMVQELHQGGRRYMMIVDPGISSSGPAGSYRPYDEGLRRGVFITNETGQPLIGKVWPGSTAFPDFTNPEALAWWEDMVAEFHDQVPFDGMWIDMNEPSNFIRGSVDGCPNNELENPPYVPGVVGGTLQAATICASSHQFLSTHYNLHNLYGATEAIASHRALVKARGTRPFVISRSTFAGHGRYAGHWTGDVWSSWEQLASSVPEILQFNLLGVPLVGADVCGFLGNTSEELCVRWTQLGAFYPFMRNHNSLTSLPQEPYSFSEPAQQAMRKALGLRYALLPHLYTLFHQAHVHGETVARPLFLEFPKDSSTWTVDHQMLWGEALLITPVLQPGKAEVTGYFPLGTWYDLQTVPVEALGSLPPPPAAPREPAIHSEGQWVTLPAPLDTINVHLREGYIIPLQGPGLTTTESRKQPMALAVALTKSGEARGELFWDDGESLEVLERGAYTQVIFEARNNTIVNELVHVTSEGAGLQLGKVTVLGVATAPQQVLSNGRPVSNFTYSPDTKVLDICVALLMGEQFLVSWC

SEQ ID NO: 37 - DNA, 2832 bp, synthetic construct
  misc_feature 1..2832: note = Variant of the Homo Sapiens Lysosomal alpha-glucosidase
  source 1..2832: mol_type = other DNA
atggaatggagctgggtctttctcttcttcctgtcagtaacgactggtgtccactccggacacattctgtggcatgatttttctaccgtgcctagagagctttccggttcaagtcaagtcctcgaagaaacacatccagcccatcaggttggcgcatctaggccgggccctcgggacgctcaactccacccagggagacctagggccgttcccactcagtgcgacgtgccagagaactcacgcttcgattgtgcacctgagaaggctatcacgcaagagcagtgcgaggcccgcggatgttgttacataccggctaaacaggggctgcagggtgcgcagatgggccaaccttggtgcttcttcccaccatcctatccgagttacaagctggagaatctctcccagtctgaaatgggatataccgcaacactgactcggaccaccccctccttctttcccaaagatatcttgactctgagacttgacgtaatgatggagacagaaaacaggctccactttaccattaaggaccctgccaatcgccgatacgaggtgcctctggaaacaccacacgtgcacagtagagctccatcacctctgtattctgtcgagttctccgaagagccgtttggcgttatcgtcaggaggcagctcgacgggcgagtgcttctgaacacgactgtggccccgttgttctttgcggatcagtttctgcaactgtcaacaagtctcccttctcagtacattaccgggcttgcagagcatctgtccccactcatgctgagtacttcatggaacaaaatcacactgtggaatagagaccttgctcctactccaggagccaacttgtatggttctcaccctttctacttggccctggaagatggcggatcagcgcatggcgtattcctcctgaattccaacgcaatggacgttgttcttcagccatctcctgctttgagttggagatctacaggcgggatactggacgtctacatctttctgggtccagagcctaaatccgtagtgcagcagtatcttgatgtcgtcggatacccgtttatgccaccatattggggcctggggttccacttgtgccgctggggatattcatccaccgccattacacgacaagttgttgagaatatgaccagggcacattttcctctggatgtacagtggaacgacctggactacatggatagtcgccgcgacttcaccttcaataaggatgggttcagagactttcctgctatggtccaagaacttcaccagggaggcaggaggtacatgatgatcgtagatccgggaatttcttcttctggcccagccggttcatacagaccgtatgacgaaggactgcgacgaggcgtctttatcacgaacgagactggtcagcctttgataggcaaggtttggccagggtccaccgctttcccggatttcacaaatcctgaggcactggcctggtgggaagatatggtcgccgagtttcacgaccaggtcccatttgacgggatgtggatcgacatgaacgagccatccaacttcattagaggaagtgtggatggctgtccgaataatgagctggaaaaccctccttacgtaccaggcgttgttggtgggactcttcaagctgcgacgatttgcgcatcctcccatcagttcctgtcaacccactataacttgcacaatctgtacgggaggacagaggctatcgccagtcatagggccctggtaaaagctagaggaacacgccctttcgttatctctcgctcaacttttgcaggccacggtaggtatgccggacattggaccggcgacgtctggagttcttgggaacagctggcttcctccgttccagagatattgcagtttaacctgttgggagtcccacttgtaggtgcagatgtttgtggcttcctggggaacacctcagaagaattgtgcgtaagatggactcaactgggcgccttctacccttttatgcgcaatcacaactcactgacatctttgcctcaagaaccgtactcatttagtgagccagcacagcaggccatgaggaaggctcttggcctgagatatgcacttctgccgcatctgtacacccttttccaccaggctcatgtccatggagagactgttgcacgacctctgttcttggagttcccaaaagactcttccacgtggacagtcgatcaccagatgctgtggggcgaggctctgctgattacacctgtattgcaacctggtaaggccgaagttaccgggtactttccattggggacctggtatgatctgcaaacagtcccggttgaagctcttggaagtcttccacctccacctgctgcaccaagggagcctgcgatccactctgaaggacagtgggtaactttgcctgcaccgctggacaccatcaatgtccatctgcgcgaaggctacatcataccacttcaaggtcctggactgaccactacagagtctagaaaacaaccaatggctcttgctgttgcactgactaaaagcggcgaagcaaggggtgagctgttctgggacgacggagagtcactggaggtactcgaacgaggcgcgtatacgcaggtcatttttgaggctcgcaataatacgatcgttaacgagctggtccacgtcacttcagaaggtgcaggccttcagttgggcaaggtaactgtcctgggagttgctacagcaccgcagcaggtcttgtccaacggacggcccgtaagcaactttacctatagtcctgataccaaagttctggacatctgcgttgctctgctgatgggtgagcagttcctggtatcatggtgc

SEQ ID NO: 38 - protein, 944 aa, synthetic construct
  REGION 1..944: note = Variant of the Homo Sapiens Lysosomal alpha-glucosidase
MEWSWVFLFFLSVTTGVHSGHILWHDFSTVPRELSGSSQVLEETHPAHQVGASRPGPRDAQLHPGRPRAVPTQCDVPENSRFDCAPEKAITQEQCEARGCCYIPAKQGLQGAQMGQPWCFFPPSYPSYKLENLSQSEMGYTATLTRTTPSFFPKDILTLRLDVMMETENRLHFTIKDPANRRYEVPLETPHVHSRAPSPLYSVEFSEEPFGVIVRRQLDGRVLLNTTVAPLFFADQFLQLSTSLPSQYITGLAEHLSPLMLSTSWNKITLWNRDLAPTPGANLYGSHPFYLALEDGGSAHGVFLLNSNAMDVVLQPSPALSWRSTGGILDVYIFLGPEPKSVVQQYLDVVGYPFMPPYWGLGFHLCRWGYSSTAITRQVVENMTRAHFPLDVQWNDLDYMDSRRDFTFNKDGFRDFPAMVQELHQGGRRYMMIVDPGISSSGPAGSYRPYDEGLRRGVFITNETGQPLIGKVWPGSTAFPDFTNPEALAWWEDMVAEFHDQVPFDGMWIDMNEPSNFIRGSVDGCPNNELENPPYVPGVVGGTLQAATICASSHQFLSTHYNLHNLYGRTEAIASHRALVKARGTRPFVISRSTFAGHGRYAGHWTGDVWSSWEQLASSVPEILQFNLLGVPLVGADVCGFLGNTSEELCVRWTQLGAFYPFMRNHNSLTSLPQEPYSFSEPAQQAMRKALGLRYALLPHLYTLFHQAHVHGETVARPLFLEFPKDSSTWTVDHQMLWGEALLITPVLQPGKAEVTGYFPLGTWYDLQTVPVEALGSLPPPPAAPREPAIHSEGQWVTLPAPLDTINVHLREGYIIPLQGPGLTTTESRKQPMALAVALTKSGEARGELFWDDGESLEVLERGAYTQVIFEARNNTIVNELVHVTSEGAGLQLGKVTVLGVATAPQQVLSNGRPVSNFTYSPDTKVLDICVALLMGEQFLVSWC

SEQ ID NO: 39 - DNA, 2832 bp, synthetic construct
  misc_feature 1..2832: note = Variant of the Homo Sapiens Lysosomal alpha-glucosidase
  source 1..2832: mol_type = other DNA
atggaatggagctgggtctttctcttcttcctgtcagtaacgactggtgtccactccggacacattctgtggcatgatttttctaccgtgcctagagagctttccggttcaagtcaagtcctcgaagaaacacatccagcccatcaggttggcgcatctaggccgggccctcgggacgctcaactccacccagggagacctagggccgttcccactcagtgcgacgtgccagagaactcacgcttcgattgtgcacctgagaaggctatcacgcaagagcagtgcgaggcccgcggatgttgttacataccggctaaacaggggctgcagggtgcgcagatgggccaaccttggtgcttcttcccaccatcctatccgagttacaagctggagaatctctcccagtctgaaatgggatataccgcaacactgactcggaccaccccctccttctttcccaaagatatcttgactctgagacttgacgtaatgatggagacagaaaacaggctccactttaccattaaggaccctgccaatcgccgatacgaggtgcctctggaaacaccacacgtgcacagtagagctccatcacctctgtattctgtcgagttctccgaagagccgtttggcgttatcgtcaggaggcagctcgacgggcgagtgcttctgaacacgactgtggccccgttgttctttgcggatcagtttctgcaactgtcaacaagtctcccttctcagtacattaccgggcttgcagagcatctgtccccactcatgctgagtacttcatggaacaaaatcacactgtggaatagagaccttgctcctactccaggagccaacttgtatggttctcaccctttctacttggccctggaagatggcggatcagcgcatggcgtattcctcctgaattccaacgcaatggacgttgttcttcagccatctcctgctttgagttggagatctacaggcgggatactggacgtctacatctttctgggtccagagcctaaatccgtagtgcagcagtatcttgatgtcgtcggatacccgtttatgccaccatattggggcctggggttccacttgtgccgctggggatattcatccaccgccattacacgacaagttgttgagaatatgaccagggcacattttcctctggatgtacagtggaacgacctggactacatggatagtcgccgcgacttcaccttcaataaggatgggttcagagactttcctgctatggtccaagaacttcaccagggaggcaggaggtacatgatgatcgtagatccgggaatttcttcttctggcccagccggttcatacagaccgtatgacgaaggactgcgacgaggcgtctttatcacgaacgagactggtcagcctttgataggcaaggtttggccagggtccaccgctttcccggatttcacaaatcctgaggcactggcctggtgggaagatatggtcgccgagtttcacgaccaggtcccatttgacgggatgtggatcgacatgaacgagccatccaacttcattagaggaagtgtggatggctgtccgaataatgagctggaaaaccctccttacgtaccaggcgttgttggtgggactcttcaagctgcgacgatttgcgcatcctcccatcagttcctgtcaacccactataacttgcacaatctgtacgggacaacagaggctatcgccagtcatagggccctggtaaaagctagaggaacacgccctttcgttatctctcgctcaacttttgcaggccacggtaggtatgccggacattggaccggcgacgtctggagttcttgggaacagctggcttcctccgttccagagatattgcagtttaacctgttgggagtcccacttgtaggtgcagatgtttgtggcttcctggggaacacctcagaagaattgtgcgtaagatggactcaactgggcgccttctacccttttatgcgcaatcacaactcactgacatctttgcctcaagaaccgtactcatttagtgagccagcacagcaggccatgaggaaggctcttggcctgagatatgcacttctgccgcatctgtacacccttttccaccaggctcatgtccatggagagactgttgcacgacctctgttcttggagttcccaaaagactcttccacgtggacagtcgatcaccagatgctgtggggcgaggctctgctgattacacctgtattgcaacctggtaaggccgaagttaccgggtactttccattggggacctggtatgatctgcaaacagtcccggttgaagctcttggaagtcttccacctccacctgctgcaccaagggagcctgcgatccactctgaaggacagtgggtaactttgcctgcaccgctggacaccatcaatgtccatctgcgcgaaggctacatcataccacttcaaggtcctggactgaccactacagagtctagaaaacaaccaatggctcttgctgttgcactgactaaatggggcgaagcaaggggtgagctgttctgggacgacggagagtcactggaggtactcgaacgaggcgcgtatacgcaggtcatttttgaggctcgcaataatacgatcgttaacgagctggtccacgtcacttcagaaggtgcaggccttcagttgggcaaggtaactgtcctgggagttgctacagcaccgcagcaggtcttgtccaacggacggcccgtaagcaactttacctatagtcctgataccaaagttctggacatctgcgttgctctgctgatgggtgagcagttcctggtatcatggtgc

SEQ ID NO: 40 - protein, 944 aa, synthetic construct
  REGION 1..944: note = Variant of the Homo Sapiens Lysosomal alpha-glucosidase
MEWSWVFLFFLSVTTGVHSGHILWHDFSTVPRELSGSSQVLEETHPAHQVGASRPGPRDAQLHPGRPRAVPTQCDVPENSRFDCAPEKAITQEQCEARGCCYIPAKQGLQGAQMGQPWCFFPPSYPSYKLENLSQSEMGYTATLTRTTPSFFPKDILTLRLDVMMETENRLHFTIKDPANRRYEVPLETPHVHSRAPSPLYSVEFSEEPFGVIVRRQLDGRVLLNTTVAPLFFADQFLQLSTSLPSQYITGLAEHLSPLMLSTSWNKITLWNRDLAPTPGANLYGSHPFYLALEDGGSAHGVFLLNSNAMDVVLQPSPALSWRSTGGILDVYIFLGPEPKSVVQQYLDVVGYPFMPPYWGLGFHLCRWGYSSTAITRQVVENMTRAHFPLDVQWNDLDYMDSRRDFTFNKDGFRDFPAMVQELHQGGRRYMMIVDPGISSSGPAGSYRPYDEGLRRGVFITNETGQPLIGKVWPGSTAFPDFTNPEALAWWEDMVAEFHDQVPFDGMWIDMNEPSNFIRGSVDGCPNNELENPPYVPGVVGGTLQAATICASSHQFLSTHYNLHNLYGTTEAIASHRALVKARGTRPFVISRSTFAGHGRYAGHWTGDVWSSWEQLASSVPEILQFNLLGVPLVGADVCGFLGNTSEELCVRWTQLGAFYPFMRNHNSLTSLPQEPYSFSEPAQQAMRKALGLRYALLPHLYTLFHQAHVHGETVARPLFLEFPKDSSTWTVDHQMLWGEALLITPVLQPGKAEVTGYFPLGTWYDLQTVPVEALGSLPPPPAAPREPAIHSEGQWVTLPAPLDTINVHLREGYIIPLQGPGLTTTESRKQPMALAVALTKWGEARGELFWDDGESLEVLERGAYTQVIFEARNNTIVNELVHVTSEGAGLQLGKVTVLGVATAPQQVLSNGRPVSNFTYSPDTKVLDICVALLMGEQFLVSWC

SEQ ID NO: 41 - DNA, 2832 bp, synthetic construct
  misc_feature 1..2832: note = Variant of the Homo Sapiens Lysosomal alpha-glucosidase
  source 1..2832: mol_type = other DNA
atggaatggagctgggtctttctcttcttcctgtcagtaacgactggtgtccactccggacacattctgtggcatgatttttcttgtgtgcctagagagctttccggttcaagtcaagtcctcgaagaaacacatccagcccatcaggttggcgcatctaggccgggccctcgggacgctcaactccacccagggagacctagggccgttcccactcagtgcgacgtgccagagaactcacgcttcgattgtgcacctgagaaggctatcacgcaagagcagtgcgaggcccgcggatgttgttacataccggctaaacaggggctgcagggtgcgcagatgggccaaccttggtgcttcttcccaccatcctatccgagttacaagctggagaatctctcccagtctgaaatgggatataccgcaacactgactcggaccaccccctccttctttcccaaagatatcttgactctgagacttgacgtaatgatggagacagaaaacaggctccactttaccattaaggaccctgccaatcgccgatacgaggtgcctctggaaacaccacacgtgcacagtagagctccatcacctctgtattctgtcgagttctccgaagagccgtttggcgttatcgtcaggaggcagctcgacgggcgagtgcttctgaacacgactgtggccccgttgttctttgcggatcagtttctgcaactgtcaacaagtctcccttctcagtacattaccgggcttgcagagcatctgtccccactcatgctgagtacttcatggaacaaaatcacactgtggaatagagaccttgctcctactccaggagccaacttgtatggttctcaccctttctacttggccctggaagatggcggatcagcgcatggcgtattcctcctgaattccaacgcaatggacgttgttcttcagccatctcctgctttgagttggagatctacaggcgggatactggacgtctacatctttctgggtccagagcctaaatccgtagtgcagcagtatcttgatgtcgtcggatacccgtttatgccaccatattggggcctggggttccacttgtgccgctggggatattcatccaccgccattacacgacaagttgttgagaatatgaccagggcacattttcctctggatgtacagtggaacgacctggactacatggatagtcgccgcgacttcaccttcaataaggatgggttcagagactttcctgctatggtccaagaacttcaccagggaggcaggaggtacatgatgatcgtagatccgggaatttcttcttctggcccagccggttcatacagaccgtatgacgaaggactgcgacgaggcgtctttatcacgaacgagactggtcagcctttgataggcaaggtttggccagggtccaccgctttcccggatttcacaaatcctgaggcactggcctggtgggaagatatggtcgccgagtttcacgaccaggtcccatttgacgggatgtggatcgacatgaacgagccatccaacttcattagaggaagtgtggatggctgtccgaataatgagctggaaaaccctccttacgtaccaggcgttgttggtgggactcttcaagctgcgacgatttgcgcatcctcccatcagttcctgtcaacccactataacttgcacaatctgtacgggacaacagaggctatcgccagtcatagggccctggtaaaagctagaggaacacgccctttcgttatctctcgctcaacttttgcaggccacggtaggtatgccggacattggaccggcgacgtctggagttcttgggaacagctggcttcctccgttccagagatattgcagtttaacctgttgggagtcccacttgtaggtgcagatgtttgtggcttcctggggaacacctcagaagaattgtgcgtaagatggactcaactgggcgccttctacccttttatgcgcaatcacaactcactgacatctttgcctcaagaaccgtactcatttagtgagccagcacagcaggccatgaggaaggctcttggcctgagatatgcacttctgccgcatctgtacacccttttccaccaggctcatgtccatggagagactgttgcacgacctctgttcttggagttcccaaaagactcttccacgtggacagtcgatcaccagatgctgtggggcgaggctctgctgattacacctgtattgcaacctggtaaggccgaagttaccgggtactttccattggggacctggtatgatctgcaaacagtcccggttgaagctcttggaagtcttccacctccacctgctgcaccaagggagcctgcgatccactctgaaggacagtgggtaactttgcctgcaccgctggacaccatcaatgtccatctgcgcgaaggctacatcataccacttcaaggtcctggactgaccactacagagtctagaaaacaaccaatggctcttgctgttgcactgactaaaagcggcgaagcaaggggtgagctgttctgggacgacggagagtcactggaggtactcgaacgaggcgcgtatacgcaggtcatttttgaggctcgcaataatacgatcgttaacgagctggtccacgtcacttcagaaggtgcaggccttcagttgggcaaggtaactgtcctgggagttgctacagcaccgcagcaggtcttgtccaacggacggcccgtaagcaactttacctatagtcctgataccaaagttctggacatctgcgttgctctgctgatgggtgagcagttcctggtatcatggtgc

SEQ ID NO: 42 - protein, 944 aa, synthetic construct
  REGION 1..944: note = Variant of the Homo Sapiens Lysosomal alpha-glucosidase
MEWSWVFLFFLSVTTGVHSGHILWHDFSCVPRELSGSSQVLEETHPAHQVGASRPGPRDAQLHPGRPRAVPTQCDVPENSRFDCAPEKAITQEQCEARGCCYIPAKQGLQGAQMGQPWCFFPPSYPSYKLENLSQSEMGYTATLTRTTPSFFPKDILTLRLDVMMETENRLHFTIKDPANRRYEVPLETPHVHSRAPSPLYSVEFSEEPFGVIVRRQLDGRVLLNTTVAPLFFADQFLQLSTSLPSQYITGLAEHLSPLMLSTSWNKITLWNRDLAPTPGANLYGSHPFYLALEDGGSAHGVFLLNSNAMDVVLQPSPALSWRSTGGILDVYIFLGPEPKSVVQQYLDVVGYPFMPPYWGLGFHLCRWGYSSTAITRQVVENMTRAHFPLDVQWNDLDYMDSRRDFTFNKDGFRDFPAMVQELHQGGRRYMMIVDPGISSSGPAGSYRPYDEGLRRGVFITNETGQPLIGKVWPGSTAFPDFTNPEALAWWEDMVAEFHDQVPFDGMWIDMNEPSNFIRGSVDGCPNNELENPPYVPGVVGGTLQAATICASSHQFLSTHYNLHNLYGTTEAIASHRALVKARGTRPFVISRSTFAGHGRYAGHWTGDVWSSWEQLASSVPEILQFNLLGVPLVGADVCGFLGNTSEELCVRWTQLGAFYPFMRNHNSLTSLPQEPYSFSEPAQQAMRKALGLRYALLPHLYTLFHQAHVHGETVARPLFLEFPKDSSTWTVDHQMLWGEALLITPVLQPGKAEVTGYFPLGTWYDLQTVPVEALGSLPPPPAAPREPAIHSEGQWVTLPAPLDTINVHLREGYIIPLQGPGLTTTESRKQPMALAVALTKSGEARGELFWDDGESLEVLERGAYTQVIFEARNNTIVNELVHVTSEGAGLQLGKVTVLGVATAPQQVLSNGRPVSNFTYSPDTKVLDICVALLMGEQFLVSWC

SEQ ID NO: 43 - DNA, 2832 bp, synthetic construct
  misc_feature 1..2832: note = Variant of the Homo Sapiens Lysosomal alpha-glucosidase
  source 1..2832: mol_type = other DNA
atggaatggagctgggtctttctcttcttcctgtcagtaacgactggtgtccactccggacacattctgtggcatgatttttctaccgtgcctagagagctttccggttcaagtcaagtcctcgaagaaacacatccagcccatcaggttggcgcatctaggccgggccctcgggacgctcaactccacccagggagacctagggccgttcccactcagtgcgacgtgccagagaactcacgcttcgattgtgcacctgagaaggctatcacgcaagagcagtgcgaggcccgcggatgttgttacataccggctaaacaggggctgcagggtgcgcagatgggccaaccttggtgcttcttcccaccatcctatccgagttacaagctggagaatctctcccagtctgaaatgggatataccgcaacactgactcggaccaccccctccttctttcccaaagatatcttgactctgagacttgacgtaatgatggagacagaaaacaggctccactttaccattaaggaccctgccaatcgccgatacgaggtgcctctggaaacaccacacgtgcacagtagagctccatcacctctgtattctgtcgagttctccgaagagccgtttggcgttatcgtcaggaggcagctcgacgggcgagtgcttctgaacacgactgtggccccgttgttctttgcggatcagtttctgcaactgtcaacaagtctcccttctcagtacattaccgggcttgcagagcatctgtccccactcatgctgagtacttcatggaacctgatcacactgtggaatagagaccttgctcctactccaggagccaacttgtatggttctcaccctttctacttggccctggaagatggcggatcagcgcatggcgtattcctcctgaattccaacgcaatggacgttgttcttcagccatctcctgctttgagttggagatctacaggcgggatactggacgtctacatctttctgggtccagagcctaaatccgtagtgcagcagtatcttgatgtcgtcggatacccgtttatgccaccatattggggcctggggttccacttgtgccgctggggatattcatccaccgccattacacgacaagttgttgagaatatgaccagggcacattttcctctggatgtacagtggaacgacctggactacatggatagtcgccgcgacttcaccttcaataaggatgggttcagagactttcctgctatggtccaagaacttcaccagggaggcaggaggtacatgatgatcgtagatccgggaatttcttcttctggcccagccggttcatacagaccgtatgacgaaggactgcgacgaggcgtctttatcacgaacgagactggtcagcctttgataggcaaggtttggccagggtccaccgctttcccggatttcacaaatcctgaggcactggcctggtgggaagatatggtcgccgagtttcacgaccaggtcccatttgacgggatgtggatcgacatgaacgagccatccaacttcattagaggaagtgtggatggctgtccgaataatgagctggaaaaccctccttacgtaccaggcgttgttggtgggactcttcaagctgcgacgatttgcgcatcctcccatcagttcctgtcaacccactataacttgcacaatctgtacgggacaacagaggctatcgccagtcatagggccctggtaaaagctagaggaacacgccctttcgttatctctcgctcaacttttgcaggccacggtaggtatgccggacattggaccggcgacgtctggagttcttgggaacagctggcttcctccgttccagagatattgcagtttaacctgttgggagtcccacttgtaggtgcagatgtttgtggcttcctggggaacacctcagaagaattgtgcgtaagatggactcaactgggcgccttctacccttttatgcgcaatcacaactcactgacatctttgcctcaagaaccgtactcatttagtgagccagcacagcaggccatgaggaaggctcttggcctgagatatgcacttctgccgcatctgtacacccttttccaccaggctcatgtccatggagagactgttgcacgacctctgttcttggagttcccaaaagactcttccacgtggacagtcgatcaccagatgctgtggggcgaggctctgctgattacacctgtattgcaacctggtaaggccgaagttaccgggtactttccattggggacctggtatgatctgcaaacagtcccggttgaagctcttggaagtcttccacctccacctgctgcaccaagggagcctgcgatccactctgaaggacagtgggtaactttgcctgcaccgctggacaccatcaatgtccatctgcgcgaaggctacatcataccacttcaaggtcctggactgaccactacagagtctagaaaacaaccaatggctcttgctgttgcactgactaaaagcggcgaagcaaggggtgagctgttctgggacgacggagagtcactggaggtactcgaacgaggcgcgtatacgcaggtcatttttgaggctcgcaataatacgatcgttaacgagctggtccacgtcacttcagaaggtgcaggccttcagttgggcaaggtaactgtcctgggagttgctacagcaccgcagcaggtcttgtccaacggacggcccgtaagcaactttacctatagtcctgataccaaagttctggacatctgcgttgctctgctgatgggtgagcagttcctggtatcatggtgc

SEQ ID NO: 44 - protein, 944 aa, synthetic construct
  REGION 1..944: note = Variant of the Homo Sapiens Lysosomal alpha-glucosidase
MEWSWVFLFFLSVTTGVHSGHILWHDFSTVPRELSGSSQVLEETHPAHQVGASRPGPRDAQLHPGRPRAVPTQCDVPENSRFDCAPEKAITQEQCEARGCCYIPAKQGLQGAQMGQPWCFFPPSYPSYKLENLSQSEMGYTATLTRTTPSFFPKDILTLRLDVMMETENRLHFTIKDPANRRYEVPLETPHVHSRAPSPLYSVEFSEEPFGVIVRRQLDGRVLLNTTVAPLFFADQFLQLSTSLPSQYITGLAEHLSPLMLSTSWNLITLWNRDLAPTPGANLYGSHPFYLALEDGGSAHGVFLLNSNAMDVVLQPSPALSWRSTGGILDVYIFLGPEPKSVVQQYLDVVGYPFMPPYWGLGFHLCRWGYSSTAITRQVVENMTRAHFPLDVQWNDLDYMDSRRDFTFNKDGFRDFPAMVQELHQGGRRYMMIVDPGISSSGPAGSYRPYDEGLRRGVFITNETGQPLIGKVWPGSTAFPDFTNPEALAWWEDMVAEFHDQVPFDGMWIDMNEPSNFIRGSVDGCPNNELENPPYVPGVVGGTLQAATICASSHQFLSTHYNLHNLYGTTEAIASHRALVKARGTRPFVISRSTFAGHGRYAGHWTGDVWSSWEQLASSVPEILQFNLLGVPLVGADVCGFLGNTSEELCVRWTQLGAFYPFMRNHNSLTSLPQEPYSFSEPAQQAMRKALGLRYALLPHLYTLFHQAHVHGETVARPLFLEFPKDSSTWTVDHQMLWGEALLITPVLQPGKAEVTGYFPLGTWYDLQTVPVEALGSLPPPPAAPREPAIHSEGQWVTLPAPLDTINVHLREGYIIPLQGPGLTTTESRKQPMALAVALTKSGEARGELFWDDGESLEVLERGAYTQVIFEARNNTIVNELVHVTSEGAGLQLGKVTVLGVATAPQQVLSNGRPVSNFTYSPDTKVLDICVALLMGEQFLVSWC

SEQ ID NO: 45 - DNA, 2832 bp, synthetic construct
  misc_feature 1..2832: note = Variant of the Homo Sapiens Lysosomal alpha-glucosidase
  source 1..2832: mol_type = other DNA
atggaatggagctgggtctttctcttcttcctgtcagtaacgactggtgtccactccggacacattctgtggcatgatttttctaccgtgcctagagagctttccggttcaagtcaagtcctcgaagaaacacatccagcccatcaggttggcgcatctaggccgggccctcgggacgctcaactccacccagggagacctagggccgttcccactcagtgcgacgtgccagagaactcacgcttcgattgtgcacctcagaaggctatcacgcaagagcagtgcgaggcccgcggatgttgttacataccggctaaacaggggctgcagggtgcgcagatgggccaaccttggtgcttcttcccaccatcctatccgagttacaagctggagaatctctcccagtctgaaatgggatataccgcaacactgactcggaccaccccctccttctttcccaaagatatcttgactctgagacttgacgtaatgatggagacagaaaacaggctccactttaccattaaggaccctgccaatcgccgatacgaggtgcctctggaaacaccacacgtgcacagtagagctccatcacctctgtattctgtcgagttctccgaagagccgtttggcgttatcgtcaggaggcagctcgacgggcgagtgcttctgaacacgactgtggccccgttgttctttgcggatcagtttctgcaactgtcaacaagtctcccttctcagtacattaccgggcttgcagagcatctgtccccactcatgctgagtacttcatggaacaaaatcacactgtggaatagagaccttgctcctactccaggagccaacttgtatggttctcaccctttctacttggccctggaagatggcggatcagcgcatggcgtattcctcctgaattccaacgcaatggacgttgttcttcagccatctcctgctttgagttggagatctacaggcgggatactggacgtctacatctttctgggtccagagcctaaatccgtagtgcagcagtatcttgatgtcgtcggatacccgtttatgccaccatattggggcctggggttccacttgtgccgctggggatattcatccaccgccattacacgacaagttgttgagaatatgaccagggcacattttcctctggatgtacagtggaacgacctggactacatggatagtcgccgcgacttcaccttcaataaggatgggttcagagactttcctgctatggtccaagaacttcaccagggaggcaggaggtacatgatgatcgtagatccgggaatttcttcttctggcccagccggttcatacagaccgtatgacgaaggactgcgacgaggcgtctttatcacgaacgagactggtcagcctttgataggcaaggtttggccagggtccaccgctttcccggatttcacaaatcctgaggcactggcctggtgggaagatatggtcgccgagtttcacgaccaggtcccatttgacgggatgtggatcgacatgaacgagccatccaacttcattagaggaagtgtggatggctgtccgaataatgagctggaaaaccctccttacgtaccaggcgttgttggtgggactcttcaagctgcgacgatttgcgcatcctcccatcagttcctgtcaacccactataacttgcacaatctgtacgggacaacagaggctatcgccagtcatagggccctggtaaaagctagaggaacacgccctttcgttatctctcgctcaacttttgcaggccacggtaggtatgccggacattggaccggcgacgtctggagttcttgggaacagctggcttcctccgttccagagatattgcagtttaacctgttgggagtcccacttgtaggtgcagatgtttgtggcttcctggggaacacctcagaagaattgtgcgtaagatggactcaactgggcgccttctacccttttatgcgcaatcacaactcactgacatctttgcctcaagaaccgtactcatttagtgagccagcacagcaggccatgaggaaggctcttggcctgagatatgcacttctgccgcatctgtacacccttttccaccaggctcatgtccatggagagactgttgcacgacctctgttcttggagttcccaaaagactcttccacgtggacagtcgatcaccagatgctgtggggcgaggctctgctgattacacctgtattgcaacctggtaaggccgaagttaccgggtactttccattggggacctggtatgatctgcaaacagtcccggttgaagctcttggaagtcttccacctccacctgctgcaccaagggagcctgcgatccactctgaaggacagtgggtaactttgcctgcaccgctggacaccatcaatgtccatctgcgcgaaggctacatcataccacttcaaggtcctggactgaccactacagagtctagaaaacaaccaatggctcttgctgttgcactgactaaaagcggcgaagcaaggggtgagctgttctgggacgacggagagtcactggaggtactcgaacgaggcgcgtatacgcaggtcatttttgaggctcgcaataatacgatcgttaacgagctggtccacgtcacttcagaaggtgcaggccttcagttgggcaaggtaactgtcctgggagttgctacagcaccgcagcaggtcttgtccaacggacggcccgtaagcaactttacctatagtcctgataccaaagttctggacatctgcgttgctctgctgatgggtgagcagttcctggtatcatggtgc

SEQ ID NO: 46 - protein, 944 aa, synthetic construct
  REGION 1..944: note = Variant of the Homo Sapiens Lysosomal alpha-glucosidase
MEWSWVFLFFLSVTTGVHSGHILWHDFSTVPRELSGSSQVLEETHPAHQVGASRPGPRDAQLHPGRPRAVPTQCDVPENSRFDCAPQKAITQEQCEARGCCYIPAKQGLQGAQMGQPWCFFPPSYPSYKLENLSQSEMGYTATLTRTTPSFFPKDILTLRLDVMMETENRLHFTIKDPANRRYEVPLETPHVHSRAPSPLYSVEFSEEPFGVIVRRQLDGRVLLNTTVAPLFFADQFLQLSTSLPSQYITGLAEHLSPLMLSTSWNKITLWNRDLAPTPGANLYGSHPFYLALEDGGSAHGVFLLNSNAMDVVLQPSPALSWRSTGGILDVYIFLGPEPKSVVQQYLDVVGYPFMPPYWGLGFHLCRWGYSSTAITRQVVENMTRAHFPLDVQWNDLDYMDSRRDFTFNKDGFRDFPAMVQELHQGGRRYMMIVDPGISSSGPAGSYRPYDEGLRRGVFITNETGQPLIGKVWPGSTAFPDFTNPEALAWWEDMVAEFHDQVPFDGMWIDMNEPSNFIRGSVDGCPNNELENPPYVPGVVGGTLQAATICASSHQFLSTHYNLHNLYGTTEAIASHRALVKARGTRPFVISRSTFAGHGRYAGHWTGDVWSSWEQLASSVPEILQFNLLGVPLVGADVCGFLGNTSEELCVRWTQLGAFYPFMRNHNSLTSLPQEPYSFSEPAQQAMRKALGLRYALLPHLYTLFHQAHVHGETVARPLFLEFPKDSSTWTVDHQMLWGEALLITPVLQPGKAEVTGYFPLGTWYDLQTVPVEALGSLPPPPAAPREPAIHSEGQWVTLPAPLDTINVHLREGYIIPLQGPGLTTTESRKQPMALAVALTKSGEARGELFWDDGESLEVLERGAYTQVIFEARNNTIVNELVHVTSEGAGLQLGKVTVLGVATAPQQVLSNGRPVSNFTYSPDTKVLDICVALLMGEQFLVSWC

SEQ ID NO: 47 - DNA, 2832 bp, synthetic construct
  misc_feature 1..2832: note = Variant of the Homo Sapiens Lysosomal alpha-glucosidase
  source 1..2832: mol_type = other DNA
atggaatggagctgggtctttctcttcttcctgtcagtaacgactggtgtccactccggacacattctgtggcatgatttttctaccgtgcctagagagctttccggttcaagtcaagtcctcgaagaaacacatccagcccatcaggttggcgcatctaggccgggccctcgggacgctcaagatcacccagggagacctagggccgttcccactcagtgcgacgtgccagagaactcacgcttcgattgtgcacctgagaaggctatcacgcaagagcagtgcgaggcccgcggatgttgttacataccggctaaacaggggctgcagggtgcgcagatgggccaaccttggtgcttcttcccaccatcctatccgagttacaagctggagaatctctcccagtctgaaatgggatataccgcaacactgactcggaccaccccctccttctttcccaaagatatcttgactctgagacttgacgtaatgatggagacagaaaacaggctccactttaccattaaggaccctgccaatcgccgatacgaggtgcctctggaaacaccacacgtgcacagtagagctccatcacctctgtattctgtcgagttctccgaagagccgtttggcgttatcgtcaggaggcagctcgacgggcgagtgcttctgaacacgactgtggccccgttgttctttgcggatcagtttctgcaactgtcaacaagtctcccttctcagtacattaccgggcttgcagagcatctgtccccactcatgctgagtacttcatggaacaaaatcacactgtggaatagagaccttgctcctactccaggagccaacttgtatggttctcaccctttctacttggccctggaagatggcggatcagcgcatggcgtattcctcctgaattccaacgcaatggacgttgttcttcagccatctcctgctttgagttggagatctacaggcgggatactggacgtctacatctttctgggtccagagcctaaatccgtagtgcagcagtatcttgatgtcgtcggatacccgtttatgccaccatattggggcctggggttccacttgtgccgctggggatattcatccaccgccattacacgacaagttgttgagaatatgaccagggcacattttcctctggatgtacagtggaacgacctggactacatggatagtcgccgcgacttcaccttcaataaggatgggttcagagactttcctgctatggtccaagaacttcaccagggaggcaggaggtacatgatgatcgtagatccgggaatttcttcttctggcccagccggttcatacagaccgtatgacgaaggactgcgacgaggcgtctttatcacgaacgagactggtcagcctttgataggcaaggtttggccagggtccaccgctttcccggatttcacaaatcctgaggcactggcctggtgggaagatatggtcgccgagtttcacgaccaggtcccatttgacgggatgtggatcgacatgaacgagccatccaacttcattagaggaagtgtggatggctgtccgaataatgagctggaaaaccctccttacgtaccaggcgttgttggtgggactcttcaagctgcgacgatttgcgcatcctcccatcagttcctgtcaacccactataacttgcacaatctgtacgggacaacagaggctatcgccagtcatagggccctggtaaaagctagaggaacacgccctttcgttatctctcgctcaacttttgcaggccacggtaggtatgccggacattggaccggcgacgtctggagttcttgggaacagctggcttcctccgttccagagatattgcagtttaacctgttgggagtcccacttgtaggtgcagatgtttgtggcttcctggggaacacctcagaagaattgtgcgtaagatggactcaactgggcgccttctacccttttatgcgcaatcacaactcactgacatctttgcctcaagaaccgtactcatttagtgagccagcacagcaggccatgaggaaggctcttggcctgagatatgcacttctgccgcatctgtacacccttttccaccaggctcatgtccatggagagactgttgcacgacctctgttcttggagttcccaaaagactcttccacgtggacagtcgatcaccagatgctgtggggcgaggctctgctgattacacctgtattgcaacctggtaaggccgaagttaccgggtactttccattggggacctggtatgatctgcaaacagtcccggttgaagctcttggaagtcttccacctccacctgctgcaccaagggagcctgcgatccactctgaaggacagtgggtaactttgcctgcaccgctggacaccatcaatgtccatctgcgcgaaggctacatcataccacttcaaggtcctggactgaccactacagagtctagaaaacaaccaatggctcttgctgttgcactgactaaaagcggcgaagcaaggggtgagctgttctgggacgacggagagtcactggaggtactcgaacgaggcgcgtatacgcaggtcatttttgaggctcgcaataatacgatcgttaacgagctggtccacgtcacttcagaaggtgcaggccttcagttgggcaaggtaactgtcctgggagttgctacagcaccgcagcaggtcttgtccaacggacggcccgtaagcaactttacctatagtcctgataccaaagttctggacatctgcgttgctctgctgatgggtgagcagttcctggtatcatggtgc

SEQ ID NO: 48 - protein, 944 aa, synthetic construct
  REGION 1..944: note = Variant of the Homo Sapiens Lysosomal alpha-glucosidase
MEWSWVFLFFLSVTTGVHSGHILWHDFSTVPRELSGSSQVLEETHPAHQVGASRPGPRDAQDHPGRPRAVPTQCDVPENSRFDCAPEKAITQEQCEARGCCYIPAKQGLQGAQMGQPWCFFPPSYPSYKLENLSQSEMGYTATLTRTTPSFFPKDILTLRLDVMMETENRLHFTIKDPANRRYEVPLETPHVHSRAPSPLYSVEFSEEPFGVIVRRQLDGRVLLNTTVAPLFFADQFLQLSTSLPSQYITGLAEHLSPLMLSTSWNKITLWNRDLAPTPGANLYGSHPFYLALEDGGSAHGVFLLNSNAMDVVLQPSPALSWRSTGGILDVYIFLGPEPKSVVQQYLDVVGYPFMPPYWGLGFHLCRWGYSSTAITRQVVENMTRAHFPLDVQWNDLDYMDSRRDFTFNKDGFRDFPAMVQELHQGGRRYMMIVDPGISSSGPAGSYRPYDEGLRRGVFITNETGQPLIGKVWPGSTAFPDFTNPEALAWWEDMVAEFHDQVPFDGMWIDMNEPSNFIRGSVDGCPNNELENPPYVPGVVGGTLQAATICASSHQFLSTHYNLHNLYGTTEAIASHRALVKARGTRPFVISRSTFAGHGRYAGHWTGDVWSSWEQLASSVPEILQFNLLGVPLVGADVCGFLGNTSEELCVRWTQLGAFYPFMRNHNSLTSLPQEPYSFSEPAQQAMRKALGLRYALLPHLYTLFHQAHVHGETVARPLFLEFPKDSSTWTVDHQMLWGEALLITPVLQPGKAEVTGYFPLGTWYDLQTVPVEALGSLPPPPAAPREPAIHSEGQWVTLPAPLDTINVHLREGYIIPLQGPGLTTTESRKQPMALAVALTKSGEARGELFWDDGESLEVLERGAYTQVIFEARNNTIVNELVHVTSEGAGLQLGKVTVLGVATAPQQVLSNGRPVSNFTYSPDTKVLDICVALLMGEQFLVSWC

SEQ ID NO: 49 - DNA, 2832 bp, synthetic construct
  misc_feature 1..2832: note = Variant of the Homo Sapiens Lysosomal alpha-glucosidase
  source 1..2832: mol_type = other DNA
atggaatggagctgggtctttctcttcttcctgtcagtaacgactggtgtccactccggacacattctgtggcatgatttttctaccgtgcctagagagctttccggttcaagtcaagtcctcgaagaaacacatccagcccatcaggttggcgcatctaggccgggccctcgggacgctcaacatcacccagggagacctagggccgttcccactcagtgcgacgtgccagagaactcacgcttcgattgtgcacctgagaaggctatcacgcaagagcagtgcgaggcccgcggatgttgttacataccggctaaacaggggctgcagggtgcgcagatgggccaaccttggtgcttcttcccaccatcctatccgagttacaagctggagaatctctcccagtctgaaatgggatataccgcaacactgactcggaccaccccctccttctttcccaaagatatcttgactctgagacttgacgtaatgatggagacagaaaacaggctccactttaccattaaggaccctgccaatcgccgatacgaggtgcctctggaaacaccacacgtgcacagtagagctccatcacctctgtattctgtcgagttctccgaagagccgtttggcgttatcgtcaggaggcagctcgacgggcgagtgcttctgaacacgactgtggccccgttgttctttgcggatcagtttctgcaactgtcaacaagtctcccttctcagtacattaccgggcttgcagagcatctgtccccactcatgctgagtacttcatggaacaaaatcacactgtggaatagagaccttgctcctactccaggagccaacttgtatggttctcaccctttctacttggccctggaagatggcggatcagcgcatggcgtattcctcctgaattccaacgcaatggacgttgttcttcagccatctcctgctttgagttggagatctacaggcgggatactggacgtctacatctttctgggtccagagcctaaatccgtagtgcagcagtatcttgatgtcgtcggatacccgtttatgccaccatattggggcctggggttccacttgtgccgctggggatattcatccaccgccattacacgacaagttgttgagaatatgaccagggcacattttcctctggatgtacagtggaacgacctggactacatggatagtcgccgcgacttcaccttcaataaggatgggttcagagactttcctgctatggtccaagaacttcaccagggaggcaggaggtacatgatgatcgtagatccgggaatttcttcttctggcccagccggttcatacagaccgtatgacgaaggactgcgacgaggcgtctttatcacgaacgagactggtcagcctttgataggcaaggtttggccagggtccaccgctttcccggatttcacaaatcctgaggcactggcctggtgggaagatatggtcgccgagtttcacgaccaggtcccatttgacgggatgtggatcgacatgaacgagccatccaacttcattagaggaagtgtggatggctgtccgaataatgagctggaaaaccctccttacgtaccaggcgttgttggtgggactcttcaagctgcgacgatttgcgcatcctcccatcagttcctgtcaacccactataacttgcacaatctgtacgggacaacagaggctatcgccagtcatagggccctggtaaaagctagaggaacacgccctttcgttatctctcgctcaacttttgcaggccacggtaggtatgccggacattggaccggcgacgtctggagttcttgggaacagctggcttcctccgttccagagatattgcagtttaacctgttgggagtcccacttgtaggtgcagatgtttgtggcttcctggggaacacctcagaagaattgtgcgtaagatggactcaactgggcgccttctacccttttatgcgcaatcacaactcactgacatctttgcctcaagaaccgtactcatttagtgagccagcacagcaggccatgaggaaggctcttggcctgagatatgcacttctgccgcatctgtacacccttttccaccaggctcatgtccatggagagactgttgcacgacctctgttcttggagttcccaaaagactcttccacgtggacagtcgatcaccagatgctgtggggcgaggctctgctgattacacctgtattgcaacctggtaaggccgaagttaccgggtactttccattggggacctggtatgatctgcaaacagtcccggttgaagctcttggaagtcttccacctccacctgctgcaccaagggagcctgcgatccactctgaaggacagtgggtaactttgcctgcaccgctggacaccatcaatgtccatctgcgcgaaggctacatcataccacttcaaggtcctggactgaccactacagagtctagaaaacaaccaatggctcttgctgttgcactgactaaaagcggcgaagcaaggggtgagctgttctgggacgacggagagtcactggaggtactcgaacgaggcgcgtatacgcaggtcatttttgaggctcgcaataatacgatcgttaacgagctggtccacgtcacttcagaaggtgcaggccttcagttgggcaaggtaactgtcctgggagttgctacagcaccgcagcaggtcttgtccaacggacggcccgtaagcaactttacctatagtcctgataccaaagttctggacatctgcgttgctctgctgatgggtgagcagttcctggtatcatggtgc

SEQ ID NO: 50 - protein, 944 aa, synthetic construct
  REGION 1..944: note = Variant of the Homo Sapiens Lysosomal alpha-glucosidase
MEWSWVFLFFLSVTTGVHSGHILWHDFSTVPRELSGSSQVLEETHPAHQVGASRPGPRDAQHHPGRPRAVPTQCDVPENSRFDCAPEKAITQEQCEARGCCYIPAKQGLQGAQMGQPWCFFPPSYPSYKLENLSQSEMGYTATLTRTTPSFFPKDILTLRLDVMMETENRLHFTIKDPANRRYEVPLETPHVHSRAPSPLYSVEFSEEPFGVIVRRQLDGRVLLNTTVAPLFFADQFLQLSTSLPSQYITGLAEHLSPLMLSTSWNKITLWNRDLAPTPGANLYGSHPFYLALEDGGSAHGVFLLNSNAMDVVLQPSPALSWRSTGGILDVYIFLGPEPKSVVQQYLDVVGYPFMPPYWGLGFHLCRWGYSSTAITRQVVENMTRAHFPLDVQWNDLDYMDSRRDFTFNKDGFRDFPAMVQELHQGGRRYMMIVDPGISSSGPAGSYRPYDEGLRRGVFITNETGQPLIGKVWPGSTAFPDFTNPEALAWWEDMVAEFHDQVPFDGMWIDMNEPSNFIRGSVDGCPNNELENPPYVPGVVGGTLQAATICASSHQFLSTHYNLHNLYGTTEAIASHRALVKARGTRPFVISRSTFAGHGRYAGHWTGDVWSSWEQLASSVPEILQFNLLGVPLVGADVCGFLGNTSEELCVRWTQLGAFYPFMRNHNSLTSLPQEPYSFSEPAQQAMRKALGLRYALLPHLYTLFHQAHVHGETVARPLFLEFPKDSSTWTVDHQMLWGEALLITPVLQPGKAEVTGYFPLGTWYDLQTVPVEALGSLPPPPAAPREPAIHSEGQWVTLPAPLDTINVHLREGYIIPLQGPGLTTTESRKQPMALAVALTKSGEARGELFWDDGESLEVLERGAYTQVIFEARNNTIVNELVHVTSEGAGLQLGKVTVLGVATAPQQVLSNGRPVSNFTYSPDTKVLDICVALLMGEQFLVSWC

SEQ ID NO: 51 - DNA, 2832 bp, synthetic construct
  misc_feature 1..2832: note = Variant of the Homo Sapiens Lysosomal alpha-glucosidase
  source 1..2832: mol_type = other DNA
atggaatggagctgggtctttctcttcttcctgtcagtaacgactggtgtccactccggacacattctgtggcatgatttttctaccgtgcctagagagctttccggttcaagtcaagtcctcgaagaaacacatccagcccatcaggttggcgcatctaggccgggccctcgggacgctcaactccacccagggagacctagggccgttcccactcagtgcgacgtgccagagaactcacgcttcgattgtgcacctgagaaggctatcacgcaagagcagtgcgaggcccgcggatgttgttacataccggctaaacaggggctgcagggtgcgcagatgggccaaccttggtgcttcttcccaccatcctatccgagttacaagctggagaatctctccaggtctgaaatgggatataccgcaacactgactcggaccaccccctccttctttcccaaagatatcttgactctgagacttgacgtaatgatggagacagaaaacaggctccactttaccattaaggaccctgccaatcgccgatacgaggtgcctctggaaacaccacacgtgcacagtagagctccatcacctctgtattctgtcgagttctccgaagagccgtttggcgttatcgtcaggaggcagctcgacgggcgagtgcttctgaacacgactgtggccccgttgttctttgcggatcagtttctgcaactgtcaacaagtctcccttctcagtacattaccgggcttgcagagcatctgtccccactcatgctgagtacttcatggaacaaaatcacactgtggaatagagaccttgctcctactccaggagccaacttgtatggttctcaccctttctacttggccctggaagatggcggatcagcgcatggcgtattcctcctgaattccaacgcaatggacgttgttcttcagccatctcctgctttgagttggagatctacaggcgggatactggacgtctacatctttctgggtccagagcctaaatccgtagtgcagcagtatcttgatgtcgtcggatacccgtttatgccaccatattggggcctggggttccacttgtgccgctggggatattcatccaccgccattacacgacaagttgttgagaatatgaccagggcacattttcctctggatgtacagtggaacgacctggactacatggatagtcgccgcgacttcaccttcaataaggatgggttcagagactttcctgctatggtccaagaacttcaccagggaggcaggaggtacatgatgatcgtagatccgggaatttcttcttctggcccagccggttcatacagaccgtatgacgaaggactgcgacgaggcgtctttatcacgaacgagactggtcagcctttgataggcaaggtttggccagggtccaccgctttcccggatttcacaaatcctgaggcactggcctggtgggaagatatggtcgccgagtttcacgaccaggtcccatttgacgggatgtggatcgacatgaacgagccatccaacttcattagaggaagtgtggatggctgtccgaataatgagctggaaaaccctccttacgtaccaggcgttgttggtgggactcttcaagctgcgacgatttgcgcatcctcccatcagttcctgtcaacccactataacttgcacaatctgtacgggacaacagaggctatcgccagtcatagggccctggtaaaagctagaggaacacgccctttcgttatctctcgctcaacttttgcaggccacggtaggtatgccggacattggaccggcgacgtctggagttcttgggaacagctggcttcctccgttccagagatattgcagtttaacctgttgggagtcccacttgtaggtgcagatgtttgtggcttcctggggaacacctcagaagaattgtgcgtaagatggactcaactgggcgccttctacccttttatgcgcaatcacaactcactgacatctttgcctcaagaaccgtactcatttagtgagccagcacagcaggccatgaggaaggctcttggcctgagatatgcacttctgccgcatctgtacacccttttccaccaggctcatgtccatggagagactgttgcacgacctctgttcttggagttcccaaaagactcttccacgtggacagtcgatcaccagatgctgtggggcgaggctctgctgattacacctgtattgcaacctggtaaggccgaagttaccgggtactttccattggggacctggtatgatctgcaaacagtcccggttgaagctcttggaagtcttccacctccacctgctgcaccaagggagcctgcgatccactctgaaggacagtgggtaactttgcctgcaccgctggacaccatcaatgtccatctgcgcgaaggctacatcataccacttcaaggtcctggactgaccactacagagtctagaaaacaaccaatggctcttgctgttgcactgactaaaagcggcgaagcaaggggtgagctgttctgggacgacggagagtcactggaggtactcgaacgaggcgcgtatacgcaggtcatttttgaggctcgcaataatacgatcgttaacgagctggtccacgtcacttcagaaggtgcaggccttcagttgggcaaggtaactgtcctgggagttgctacagcaccgcagcaggtcttgtccaacggacggcccgtaagcaactttacctatagtcctgataccaaagttctggacatctgcgttgctctgctgatgggtgagcagttcctggtatcatggtgc

SEQ ID NO: 52 - protein, 944 aa, synthetic construct
  REGION 1..944: note = Variant of the Homo Sapiens Lysosomal alpha-glucosidase
MEWSWVFLFFLSVTTGVHSGHILWHDFSTVPRELSGSSQVLEETHPAHQVGASRPGPRDAQLHPGRPRAVPTQCDVPENSRFDCAPEKAITQEQCEARGCCYIPAKQGLQGAQMGQPWCFFPPSYPSYKLENLSRSEMGYTATLTRTTPSFFPKDILTLRLDVMMETENRLHFTIKDPANRRYEVPLETPHVHSRAPSPLYSVEFSEEPFGVIVRRQLDGRVLLNTTVAPLFFADQFLQLSTSLPSQYITGLAEHLSPLMLSTSWNKITLWNRDLAPTPGANLYGSHPFYLALEDGGSAHGVFLLNSNAMDVVLQPSPALSWRSTGGILDVYIFLGPEPKSVVQQYLDVVGYPFMPPYWGLGFHLCRWGYSSTAITRQVVENMTRAHFPLDVQWNDLDYMDSRRDFTFNKDGFRDFPAMVQELHQGGRRYMMIVDPGISSSGPAGSYRPYDEGLRRGVFITNETGQPLIGKVWPGSTAFPDFTNPEALAWWEDMVAEFHDQVPFDGMWIDMNEPSNFIRGSVDGCPNNELENPPYVPGVVGGTLQAATICASSHQFLSTHYNLHNLYGTTEAIASHRALVKARGTRPFVISRSTFAGHGRYAGHWTGDVWSSWEQLASSVPEILQFNLLGVPLVGADVCGFLGNTSEELCVRWTQLGAFYPFMRNHNSLTSLPQEPYSFSEPAQQAMRKALGLRYALLPHLYTLFHQAHVHGETVARPLFLEFPKDSSTWTVDHQMLWGEALLITPVLQPGKAEVTGYFPLGTWYDLQTVPVEALGSLPPPPAAPREPAIHSEGQWVTLPAPLDTINVHLREGYIIPLQGPGLTTTESRKQPMALAVALTKSGEARGELFWDDGESLEVLERGAYTQVIFEARNNTIVNELVHVTSEGAGLQLGKVTVLGVATAPQQVLSNGRPVSNFTYSPDTKVLDICVALLMGEQFLVSWC

SEQ ID NO: 53 - DNA, 2832 bp, synthetic construct
  misc_feature 1..2832: note = Variant of the Homo Sapiens Lysosomal alpha-glucosidase
  source 1..2832: mol_type = other DNA
atggaatggagctgggtctttctcttcttcctgtcagtaacgactggtgtccactccggacacattctgcttcatgatttttctaccgtgcctagagagctttccggttcaagtcaagtcctcgaagaaacacatccagcccatcaggttggcgcatctaggccgggccctcgggacgctcaactccacccagggagacctagggccgttcccactcagtgcgacgtgccagagaactcacgcttcgattgtgcacctgagaaggctatcacgcaagagcagtgcgaggcccgcggatgttgttacataccggctaaacaggggctgcagggtgcgcagatgggccaaccttggtgcttcttcccaccatcctatccgagttacaagctggagaatctctcccagtctgaaatgggatataccgcaacactgactcggaccaccccctccttctttcccaaagatatcttgactctgagacttgacgtaatgatggagacagaaaacaggctccactttaccattaaggaccctgccaatcgccgatacgaggtgcctctggaaacaccacacgtgcacagtagagctccatcacctctgtattctgtcgagttctccgaagagccgtttggcgttatcgtcaggaggcagctcgacgggcgagtgcttctgaacacgactgtggccccgttgttctttgcggatcagtttctgcaactgtcaacaagtctcccttctcagtacattaccgggcttgcagagcatctgtccccactcatgctgagtacttcatggaacaaaatcacactgtggaatagagaccttgctcctactccaggagccaacttgtatggttctcaccctttctacttggccctggaagatggcggatcagcgcatggcgtattcctcctgaattccaacgcaatggacgttgttcttcagccatctcctgctttgagttggagatctacaggcgggatactggacgtctacatctttctgggtccagagcctaaatccgtagtgcagcagtatcttgatgtcgtcggatacccgtttatgccaccatattggggcctggggttccacttgtgccgctggggatattcatccaccgccattacacgacaagttgttgagaatatgaccagggcacattttcctctggatgtacagtggaacgacctggactacatggatagtcgccgcgacttcaccttcaataaggatgggttcagagactttcctgctatggtccaagaacttcaccagggaggcaggaggtacatgatgatcgtagatccgggaatttcttcttctggcccagccggttcatacagaccgtatgacgaaggactgcgacgaggcgtctttatcacgaacgagactggtcagcctttgataggcaaggtttggccagggtccaccgctttcccggatttcacaaatcctgaggcactggcctggtgggaagatatggtcgccgagtttcacgaccaggtcccatttgacgggatgtggatcgacatgaacgagccatccaacttcattagaggaagtgtggatggctgtccgaataatgagctggaaaaccctccttacgtaccaggcgttgttggtgggactcttcaagctgcgacgatttgcgcatcctcccatcagttcctgtcaacccactataacttgcacaatctgtacgggacaacagaggctatcgccagtcatagggccctggtaaaagctagaggaacacgccctttcgttatctctcgctcaacttttgcaggccacggtaggtatgccggacattggaccggcgacgtctggagttcttgggaacagctggcttcctccgttccagagatattgcagtttaacctgttgggagtcccacttgtaggtgcagatgtttgtggcttcctggggaacacctcagaagaattgtgcgtaagatggactcaactgggcgccttctacccttttatgcgcaatcacaactcactgacatctttgcctcaagaaccgtactcatttagtgagccagcacagcaggccatgaggaaggctcttggcctgagatatgcacttctgccgcatctgtacacccttttccaccaggctcatgtccatggagagactgttgcacgacctctgttcttggagttcccaaaagactcttccacgtggacagtcgatcaccagatgctgtggggcgaggctctgctgattacacctgtattgcaacctggtaaggccgaagttaccgggtactttccattggggacctggtatgatctgcaaacagtcccggttgaagctcttggaagtcttccacctccacctgctgcaccaagggagcctgcgatccactctgaaggacagtgggtaactttgcctgcaccgctggacaccatcaatgtccatctgcgcgaaggctacatcataccacttcaaggtcctggactgaccactacagagtctagaaaacaaccaatggctcttgctgttgcactgactaaaagcggcgaagcaaggggtgagctgttctgggacgacggagagtcactggaggtactcgaacgaggcgcgtatacgcaggtcatttttgaggctcgcaataatacgatcgttaacgagctggtccacgtcacttcagaaggtgcaggccttcagttgggcaaggtaactgtcctgggagttgctacagcaccgcagcaggtcttgtccaacggacggcccgtaagcaactttacctatagtcctgataccaaagttctggacatctgcgttgctctgctgatgggtgagcagttcctggtatcatggtgc

SEQ ID NO: 54 - protein, 944 aa, synthetic construct
  REGION 1..944: note = Variant of the Homo Sapiens Lysosomal alpha-glucosidase
MEWSWVFLFFLSVTTGVHSGHILLHDFSTVPRELSGSSQVLEETHPAHQVGASRPGPRDAQLHPGRPRAVPTQCDVPENSRFDCAPEKAITQEQCEARGCCYIPAKQGLQGAQMGQPWCFFPPSYPSYKLENLSQSEMGYTATLTRTTPSFFPKDILTLRLDVMMETENRLHFTIKDPANRRYEVPLETPHVHSRAPSPLYSVEFSEEPFGVIVRRQLDGRVLLNTTVAPLFFADQFLQLSTSLPSQYITGLAEHLSPLMLSTSWNKITLWNRDLAPTPGANLYGSHPFYLALEDGGSAHGVFLLNSNAMDVVLQPSPALSWRSTGGILDVYIFLGPEPKSVVQQYLDVVGYPFMPPYWGLGFHLCRWGYSSTAITRQVVENMTRAHFPLDVQWNDLDYMDSRRDFTFNKDGFRDFPAMVQELHQGGRRYMMIVDPGISSSGPAGSYRPYDEGLRRGVFITNETGQPLIGKVWPGSTAFPDFTNPEALAWWEDMVAEFHDQVPFDGMWIDMNEPSNFIRGSVDGCPNNELENPPYVPGVVGGTLQAATICASSHQFLSTHYNLHNLYGTTEAIASHRALVKARGTRPFVISRSTFAGHGRYAGHWTGDVWSSWEQLASSVPEILQFNLLGVPLVGADVCGFLGNTSEELCVRWTQLGAFYPFMRNHNSLTSLPQEPYSFSEPAQQAMRKALGLRYALLPHLYTLFHQAHVHGETVARPLFLEFPKDSSTWTVDHQMLWGEALLITPVLQPGKAEVTGYFPLGTWYDLQTVPVEALGSLPPPPAAPREPAIHSEGQWVTLPAPLDTINVHLREGYIIPLQGPGLTTTESRKQPMALAVALTKSGEARGELFWDDGESLEVLERGAYTQVIFEARNNTIVNELVHVTSEGAGLQLGKVTVLGVATAPQQVLSNGRPVSNFTYSPDTKVLDICVALLMGEQFLVSWC

SEQ ID NO: 55 - DNA, 2832 bp, synthetic construct
  misc_feature 1..2832: note = Variant of the Homo Sapiens Lysosomal alpha-glucosidase
  source 1..2832: mol_type = other DNA
atggaatggagctgggtctttctcttcttcctgtcagtaacgactggtgtccactccggacacattctgtggcatgatttttctaccgtgcctagagagctttccggttcaagtcaagtcctcgaagaaacacatccagcccatcaggttggcgcatctaggccgggccctcgggacgctcaactccacccagggagacctagggccgttcccactcagtgcgacgtgccagagaactcacgcttcgattgtgcacctgagaaggctatcacgcaagagcagtgcgaggcccgcggatgttgttacataccggctaaacaggggctgcagggtgcgcagatgggccaaccttggtgcttcttcccaccatcctatccgagttacaagctggagaatctctcccagtctgaaatgggatataccgcaacactgactcggaccaccccctccttctttcccaaagatatcttgactctgagacttgacgtaatgatggagacagaaaacaggctccactttaccattaaggaccctgccaatcgccgatacgaggtgcctctggaaacaccacacgtgcacagtagagctccatcacctctgtattctgtcgagttctccgaagagccgtttggcgttatcgtcaggaggcagctcgacgggcgagtgcttctgaacacgactgtggccccgttgttctttgcggatcagtttctgcaactgtcaacaagtctcccttctcagtacattaccgggcttgcagagcatctgtccccactcatgctgagtacttcatggaacaaaatcacactgtggaatagagaccttgctcctactccaggagccaacttgtatggttctcaccctttctacttggccctggaagatggcggatcagcgcatggcgtattcctcctgaattccaacgcaatggacgttgttcttcagccatctcctgctttgagttggagatctacaggcgggatactggacgtctacatctttctgggtccagagcctaaatccgtagtgcagcagtatcttgatgtcgtcggatacccgtttatgccaccatattggggcctggggttccacttgtgccgctggggatattcatccaccgccattacacgacaagttgttgagaatatgaccagggcacattttcctctggatgtacagtggaacgacctggactacatggatagtcgccgcgacttcaccttcaataaggatgggttcagagactttcctgctatggtccaagaacttcaccagggaggcaggaggtacatgatgatcgtagatccgggaatttcttcttctggcccagccggttcatacagaccgtatgacgaaggactgcgacgaggcgtctttatcacgaacgagactggtcagcctttgataggcaaggtttggccagggtccaccgctttcccggatttcacaaatcctgaggcactggcctggtgggaagatatggtcgccgagtttcacgaccaggtcccatttgacgggatgtggatcgacatgaacgagccatccaacttcattagaggaagtgtggatggctgtccgaataatgagctggaaaaccctccttacgtaccaggcgttgttggtgggactcttcaagctgcgacgatttgcgcatcctcccatcagttcctgtcaacccactataacttgcacaatctgtacgggacaacagaggctatcgccagtcatagggccctggtaaaagctagaggaacacgccctttcgttatctctcgctcaacttttgcaggccacggtaggtatgccggacattggaccggcgacgtctggagttcttgggaacagctggcttcctccgttccagagatattgcagtttaacctgttgggagtcccacttgtaggtgcagatgtttgtggcttcctggggaacacctcagaagaattgtgcgtaagatggactcaactgggcgccttctacccttttatgcgcaatcacaactcactgacatctttgcctcaagaaccgtactcatttagtgagccagcacagcaggccatgaggaaggctcttggcctgagatatgcacttctgccgcatctgtacacccttttccaccaggctcatgtccatggagagactgttgcacgacctctgttcttggagttcccaaaagactcttccacgtggacagtcgatcaccagatgctgtggggcgaggctctgctgattacacctgtattgcaacctggtaaggccgaagttaccgggtactttccattggggacctggtatgatctgcaaacagtcccggttgaagctcttggaagtcttccacctccacctgctgcaccaagggagcctgcgatccactctgaaggacagtgggtaactttgcctgcaccgctggacaccatcaatgtccatctgcgcgaaggctacatcataccacttcaaggtcctggactgaccactacagagtctagaaaacaaccaatggctcttgctgttgcactgactaaaagcggcgaagcaaggggtgagctgttctgggacgacggagagtcactggaggtactcgaacgaggcgcgtatacgcaggtcatttttgcggctcgcaataatacgatcgttaacgagctggtccacgtcacttcagaaggtgcaggccttcagttgggcaaggtaactgtcctgggagttgctacagcaccgcagcaggtcttgtccaacggacggcccgtaagcaactttacctatagtcctgataccaaagttctggacatctgcgttgctctgctgatgggtgagcagttcctggtatcatggtgc

SEQ ID NO: 56 - protein, 944 aa, synthetic construct
  REGION 1..944: note = Variant of the Homo Sapiens Lysosomal alpha-glucosidase
MEWSWVFLFFLSVTTGVHSGHILWHDFSTVPRELSGSSQVLEETHPAHQVGASRPGPRDAQLHPGRPRAVPTQCDVPENSRFDCAPEKAITQEQCEARGCCYIPAKQGLQGAQMGQPWCFFPPSYPSYKLENLSQSEMGYTATLTRTTPSFFPKDILTLRLDVMMETENRLHFTIKDPANRRYEVPLETPHVHSRAPSPLYSVEFSEEPFGVIVRRQLDGRVLLNTTVAPLFFADQFLQLSTSLPSQYITGLAEHLSPLMLSTSWNKITLWNRDLAPTPGANLYGSHPFYLALEDGGSAHGVFLLNSNAMDVVLQPSPALSWRSTGGILDVYIFLGPEPKSVVQQYLDVVGYPFMPPYWGLGFHLCRWGYSSTAITRQVVENMTRAHFPLDVQWNDLDYMDSRRDFTFNKDGFRDFPAMVQELHQGGRRYMMIVDPGISSSGPAGSYRPYDEGLRRGVFITNETGQPLIGKVWPGSTAFPDFTNPEALAWWEDMVAEFHDQVPFDGMWIDMNEPSNFIRGSVDGCPNNELENPPYVPGVVGGTLQAATICASSHQFLSTHYNLHNLYGTTEAIASHRALVKARGTRPFVISRSTFAGHGRYAGHWTGDVWSSWEQLASSVPEILQFNLLGVPLVGADVCGFLGNTSEELCVRWTQLGAFYPFMRNHNSLTSLPQEPYSFSEPAQQAMRKALGLRYALLPHLYTLFHQAHVHGETVARPLFLEFPKDSSTWTVDHQMLWGEALLITPVLQPGKAEVTGYFPLGTWYDLQTVPVEALGSLPPPPAAPREPAIHSEGQWVTLPAPLDTINVHLREGYIIPLQGPGLTTTESRKQPMALAVALTKSGEARGELFWDDGESLEVLERGAYTQVIFAARNNTIVNELVHVTSEGAGLQLGKVTVLGVATAPQQVLSNGRPVSNFTYSPDTKVLDICVALLMGEQFLVSWC

SEQ ID NO: 57 - DNA, 2832 bp, synthetic construct
  misc_feature 1..2832: note = Variant of the Homo Sapiens Lysosomal alpha-glucosidase
  source 1..2832: mol_type = other DNA
atggaatggagctgggtctttctcttcttcctgtcagtaacgactggtgtccactccggacacattctgtggcatgatttttctaccgtgcctagagagctttccggttcaagtcaagtcctcgaagaaacacatccagcccatcagagtggcgcatctaggccgggccctcgggacgctcaactccacccagggagacctagggccgttcccactcagtgcgacgtgccagagaactcacgcttcgattgtgcacctgagaaggctatcacgcaagagcagtgcgaggcccgcggatgttgttacataccggctaaacaggggctgcagggtgcgcagatgggccaaccttggtgcttcttcccaccatcctatccgagttacaagctggagaatctctcccagtctgaaatgggatataccgcaacactgactcggaccaccccctccttctttcccaaagatatcttgactctgagacttgacgtaatgatggagacagaaaacaggctccactttaccattaaggaccctgccaatcgccgatacgaggtgcctctggaaacaccacacgtgcacagtagagctccatcacctctgtattctgtcgagttctccgaagagccgtttggcgttatcgtcaggaggcagctcgacgggcgagtgcttctgaacacgactgtggccccgttgttctttgcggatcagtttctgcaactgtcaacaagtctcccttctcagtacattaccgggcttgcagagcatctgtccccactcatgctgagtacttcatggaacaaaatcacactgtggaatagagaccttgctcctactccaggagccaacttgtatggttctcaccctttctacttggccctggaagatggcggatcagcgcatggcgtattcctcctgaattccaacgcaatggacgttgttcttcagccatctcctgctttgagttggagatctacaggcgggatactggacgtctacatctttctgggtccagagcctaaatccgtagtgcagcagtatcttgatgtcgtcggatacccgtttatgccaccatattggggcctggggttccacttgtgccgctggggatattcatccaccgccattacacgacaagttgttgagaatatgaccagggcacattttcctctggatgtacagtggaacgacctggactacatggatagtcgccgcgacttcaccttcaataaggatgggttcagagactttcctgctatggtccaagaacttcaccagggaggcaggaggtacatgatgatcgtagatccgggaatttcttcttctggcccagccggttcatacagaccgtatgacgaaggactgcgacgaggcgtctttatcacgaacgagactggtcagcctttgataggcaaggtttggccagggtccaccgctttcccggatttcacaaatcctgaggcactggcctggtgggaagatatggtcgccgagtttcacgaccaggtcccatttgacgggatgtggatcgacatgaacgagccatccaacttcattagaggaagtgtggatggctgtccgaataatgagctggaaaaccctccttacgtaccaggcgttgttggtgggactcttcaagctgcgacgatttgcgcatcctcccatcagttcctgtcaacccactataacttgcacaatctgtacgggacaacagaggctatcgccagtcatagggccctggtaaaagctagaggaacacgccctttcgttatctctcgctcaacttttgcaggccacggtaggtatgccggacattggaccggcgacgtctggagttcttgggaacagctggcttcctccgttccagagatattgcagtttaacctgttgggagtcccacttgtaggtgcagatgtttgtggcttcctggggaacacctcagaagaattgtgcgtaagatggactcaactgggcgccttctacccttttatgcgcaatcacaactcactgacatctttgcctcaagaaccgtactcatttagtgagccagcacagcaggccatgaggaaggctcttggcctgagatatgcacttctgccgcatctgtacacccttttccaccaggctcatgtccatggagagactgttgcacgacctctgttcttggagttcccaaaagactcttccacgtggacagtcgatcaccagatgctgtggggcgaggctctgctgattacacctgtattgcaacctggtaaggccgaagttaccgggtactttccattggggacctggtatgatctgcaaacagtcccggttgaagctcttggaagtcttccacctccacctgctgcaccaagggagcctgcgatccactctgaaggacagtgggtaactttgcctgcaccgctggacaccatcaatgtccatctgcgcgaaggctacatcataccacttcaaggtcctggactgaccactacagagtctagaaaacaaccaatggctcttgctgttgcactgactaaaagcggcgaagcaaggggtgagctgttctgggacgacggagagtcactggaggtactcgaacgaggcgcgtatacgcaggtcatttttgaggctcgcaataatacgatcgttaacgagctggtccacgtcacttcagaaggtgcaggccttcagttgggcaaggtaactgtcctgggagttgctacagcaccgcagcaggtcttgtccaacggacggcccgtaagcaactttacctatagtcctgataccaaagttctggacatctgcgttgctctgctgatgggtgagcagttcctggtatcatggtgc

SEQ ID NO: 58 - protein, 944 aa, synthetic construct
  REGION 1..944: note = Variant of the Homo Sapiens Lysosomal alpha-glucosidase
MEWSWVFLFFLSVTTGVHSGHILWHDFSTVPRELSGSSQVLEETHPAHQSGASRPGPRDAQLHPGRPRAVPTQCDVPENSRFDCAPEKAITQEQCEARGCCYIPAKQGLQGAQMGQPWCFFPPSYPSYKLENLSQSEMGYTATLTRTTPSFFPKDILTLRLDVMMETENRLHFTIKDPANRRYEVPLETPHVHSRAPSPLYSVEFSEEPFGVIVRRQLDGRVLLNTTVAPLFFADQFLQLSTSLPSQYITGLAEHLSPLMLSTSWNKITLWNRDLAPTPGANLYGSHPFYLALEDGGSAHGVFLLNSNAMDVVLQPSPALSWRSTGGILDVYIFLGPEPKSVVQQYLDVVGYPFMPPYWGLGFHLCRWGYSSTAITRQVVENMTRAHFPLDVQWNDLDYMDSRRDFTFNKDGFRDFPAMVQELHQGGRRYMMIVDPGISSSGPAGSYRPYDEGLRRGVFITNETGQPLIGKVWPGSTAFPDFTNPEALAWWEDMVAEFHDQVPFDGMWIDMNEPSNFIRGSVDGCPNNELENPPYVPGVVGGTLQAATICASSHQFLSTHYNLHNLYGTTEAIASHRALVKARGTRPFVISRSTFAGHGRYAGHWTGDVWSSWEQLASSVPEILQFNLLGVPLVGADVCGFLGNTSEELCVRWTQLGAFYPFMRNHNSLTSLPQEPYSFSEPAQQAMRKALGLRYALLPHLYTLFHQAHVHGETVARPLFLEFPKDSSTWTVDHQMLWGEALLITPVLQPGKAEVTGYFPLGTWYDLQTVPVEALGSLPPPPAAPREPAIHSEGQWVTLPAPLDTINVHLREGYIIPLQGPGLTTTESRKQPMALAVALTKSGEARGELFWDDGESLEVLERGAYTQVIFEARNNTIVNELVHVTSEGAGLQLGKVTVLGVATAPQQVLSNGRPVSNFTYSPDTKVLDICVALLMGEQFLVSWC

SEQ ID NO: 59 - DNA, 2832 bp, synthetic construct
  misc_feature 1..2832: note = Variant of the Homo Sapiens Lysosomal alpha-glucosidase
  source 1..2832: mol_type = other DNA
atggaatggagctgggtctttctcttcttcctgtcagtaacgactggtgtccactccggacacattctgtggcatgatttttctaccgtgcctagagagctttccggttcaagtcaagtcctcgaagaaacacatccagcccatcaggttggcgcatctaggccgggccctcgggacgctcaagcgcacccagggagacctagggccgttcccactcagtgcgacgtgccagagaactcacgcttcgattgtgcacctgagaaggctatcacgcaagagcagtgcgaggcccgcggatgttgttacataccggctaaacaggggctgcagggtgcgcagatgggccaaccttggtgcttcttcccaccatcctatccgagttacaagctggagaatctctcccagtctgaaatgggatataccgcaacactgactcggaccaccccctccttctttcccaaagatatcttgactctgagacttgacgtaatgatggagacagaaaacaggctccactttaccattaaggaccctgccaatcgccgatacgaggtgcctctggaaacaccacacgtgcacagtagagctccatcacctctgtattctgtcgagttctccgaagagccgtttggcgttatcgtcaggaggcagctcgacgggcgagtgcttctgaacacgactgtggccccgttgttctttgcggatcagtttctgcaactgtcaacaagtctcccttctcagtacattaccgggcttgcagagcatctgtccccactcatgctgagtacttcatggaacaaaatcacactgtggaatagagaccttgctcctactccaggagccaacttgtatggttctcaccctttctacttggccctggaagatggcggatcagcgcatggcgtattcctcctgaattccaacgcaatggacgttgttcttcagccatctcctgctttgagttggagatctacaggcgggatactggacgtctacatctttctgggtccagagcctaaatccgtagtgcagcagtatcttgatgtcgtcggatacccgtttatgccaccatattggggcctggggttccacttgtgccgctggggatattcatccaccgccattacacgacaagttgttgagaatatgaccagggcacattttcctctggatgtacagtggaacgacctggactacatggatagtcgccgcgacttcaccttcaataaggatgggttcagagactttcctgctatggtccaagaacttcaccagggaggcaggaggtacatgatgatcgtagatccgggaatttcttcttctggcccagccggttcatacagaccgtatgacgaaggactgcgacgaggcgtctttatcacgaacgagactggtcagcctttgataggcaaggtttggccagggtccaccgctttcccggatttcacaaatcctgaggcactggcctggtgggaagatatggtcgccgagtttcacgaccaggtcccatttgacgggatgtggatcgacatgaacgagccatccaacttcattagaggaagtgtggatggctgtccgaataatgagctggaaaaccctccttacgtaccaggcgttgttggtgggactcttcaagctgcgacgatttgcgcatcctcccatcagttcctgtcaacccactataacttgcacaatctgtacgggacaacagaggctatcgccagtcatagggccctggtaaaagctagaggaacacgccctttcgttatctctcgctcaacttttgcaggccacggtaggtatgccggacattggaccggcgacgtctggagttcttgggaacagctggcttcctccgttccagagatattgcagtttaacctgttgggagtcccacttgtaggtgcagatgtttgtggcttcctggggaacacctcagaagaattgtgcgtaagatggactcaactgggcgccttctacccttttatgcgcaatcacaactcactgacatctttgcctcaagaaccgtactcatttagtgagccagcacagcaggccatgaggaaggctcttggcctgagatatgcacttctgccgcatctgtacacccttttccaccaggctcatgtccatggagagactgttgcacgacctctgttcttggagttcccaaaagactcttccacgtggacagtcgatcaccagatgctgtggggcgaggctctgctgattacacctgtattgcaacctggtaaggccgaagttaccgggtactttccattggggacctggtatgatctgcaaacagtcccggttgaagctcttggaagtcttccacctccacctgctgcaccaagggagcctgcgatccactctgaaggacagtgggtaactttgcctgcaccgctggacaccatcaatgtccatctgcgcgaaggctacatcataccacttcaaggtcctggactgaccactacagagtctagaaaacaaccaatggctcttgctgttgcactgactaaaagcggcgaagcaaggggtgagctgttctgggacgacggagagtcactggaggtactcgaacgaggcgcgtatacgcaggtcatttttgaggctcgcaataatacgatcgttaacgagctggtccacgtcacttcagaaggtgcaggccttcagttgggcaaggtaactgtcctgggagttgctacagcaccgcagcaggtcttgtccaacggacggcccgtaagcaactttacctatagtcctgataccaaagttctggacatctgcgttgctctgctgatgggtgagcagttcctggtatcatggtgc

SEQ ID NO: 60 - protein, 944 aa, synthetic construct
  REGION 1..944: note = Variant of the Homo Sapiens Lysosomal alpha-glucosidase
MEWSWVFLFFLSVTTGVHSGHILWHDFSTVPRELSGSSQVLEETHPAHQVGASRPGPRDAQAHPGRPRAVPTQCDVPENSRFDCAPEKAITQEQCEARGCCYIPAKQGLQGAQMGQPWCFFPPSYPSYKLENLSQSEMGYTATLTRTTPSFFPKDILTLRLDVMMETENRLHFTIKDPANRRYEVPLETPHVHSRAPSPLYSVEFSEEPFGVIVRRQLDGRVLLNTTVAPLFFADQFLQLSTSLPSQYITGLAEHLSPLMLSTSWNKITLWNRDLAPTPGANLYGSHPFYLALEDGGSAHGVFLLNSNAMDVVLQPSPALSWRSTGGILDVYIFLGPEPKSVVQQYLDVVGYPFMPPYWGLGFHLCRWGYSSTAITRQVVENMTRAHFPLDVQWNDLDYMDSRRDFTFNKDGFRDFPAMVQELHQGGRRYMMIVDPGISSSGPAGSYRPYDEGLRRGVFITNETGQPLIGKVWPGSTAFPDFTNPEALAWWEDMVAEFHDQVPFDGMWIDMNEPSNFIRGSVDGCPNNELENPPYVPGVVGGTLQAATICASSHQFLSTHYNLHNLYGTTEAIASHRALVKARGTRPFVISRSTFAGHGRYAGHWTGDVWSSWEQLASSVPEILQFNLLGVPLVGADVCGFLGNTSEELCVRWTQLGAFYPFMRNHNSLTSLPQEPYSFSEPAQQAMRKALGLRYALLPHLYTLFHQAHVHGETVARPLFLEFPKDSSTWTVDHQMLWGEALLITPVLQPGKAEVTGYFPLGTWYDLQTVPVEALGSLPPPPAAPREPAIHSEGQWVTLPAPLDTINVHLREGYIIPLQGPGLTTTESRKQPMALAVALTKSGEARGELFWDDGESLEVLERGAYTQVIFEARNNTIVNELVHVTSEGAGLQLGKVTVLGVATAPQQVLSNGRPVSNFTYSPDTKVLDICVALLMGEQFLVSWC

SEQ ID NO: 61 - DNA, 2832 bp, synthetic construct
  misc_feature 1..2832: note = Variant of the Homo Sapiens Lysosomal alpha-glucosidase
  source 1..2832: mol_type = other DNA
atggaatggagctgggtctttctcttcttcctgtcagtaacgactggtgtccactccggacacattctgtggcatgatttttctaccgtgcctagagagctttccggttcaagtcaagtcctcgaagaaacacatccagcccatcaggttggcgcatctaggccgggccctcgggacgctcaactccacccagggagacctagggccgttcccactcagtgcgacgtgccagagaactcacgcttcgattgtgcacctgagaaggctatcacgcaagagcagtgcgaggcccgcggatgttgttacataccggctaaacaggggctgcagggtgcgcagatgggccaaccttggtgcttcttcccaccatcctatccgagttacaagctggagaatctctcccagtctgaaatgggatataccgcaacactgactcggaccaccccctccttctttcccaaagatatcttgactctgagacttgacgtaatgatggagacagaaaacaggctccactttaccattaaggaccctgccaatcgccgatacgaggtgcctctggaaacaccacacgtgcacagtagagctccatcacctctgtattctgtcgagttctccgaagagccgtttggcgttatcgtcaggaggcagctcgacgggcgagtgcttctgaacacgactgtggccccgttgttctttgcggatcagtttctgcaactgtcaacaagtctcccttctcagtacattaccgggcttgcagagcatctgtccccactcatgctgagtacttcatggaacaaaatcacactgtggaatagagaccttgctcctactccaggagccaacttgtatggttctcaccctttctacttggccctggaagatggcggatcagcgcatggcgtattcctcctgaattccaacgcaatggacgttgttcttcagccatctcctgctttgagttggagatctacaggcgggatactggacgtctacatctttctgggtccagagcctaaatccgtagtgcagcagtatcttgatgtcgtcggatacccgtttatgccaccatattggggcctggggttccacttgtgccgctggggatattcatccaccgccattacacgacaagttgttgagaatatgaccagggcacattttcctctggatgtacagtggaacgacctggactacatggatagtcgccgcgacttcaccttcaataaggatgggttcagagactttcctgctatggtccaagaacttcaccagggaggcaggaggtacatgatgatcgtagatccgggaatttcttcttctggcccagccggttcatacagaccgtatgacgaaggactgcgacgaggcgtctttatcacgaacgagactggtcagcctttgataggcaaggtttggccagggtccaccgctttcccggatttcacaaatcctgaggcactggcctggtgggaagatatggtcgccgagtttcacgaccaggtcccatttgacgggatgtggatcgacatgaacgagccatccaacttcattagaggaagtgtggatggctgtccgaataatgagctggaaaaccctccttacgtaccaggcgttgttggtgggactcttcaagctgcgacgatttgcgcatcctcccatcagttcctgtcaacccactataacttgcacaatctgtacgggggtacagaggctatcgccagtcatagggccctggtaaaagctagaggaacacgccctttcgttatctctcgctcaacttttgcaggccacggtaggtatgccggacattggaccggcgacgtctggagttcttgggaacagctggcttcctccgttccagagatattgcagtttaacctgttgggagtcccacttgtaggtgcagatgtttgtggcttcctggggaacacctcagaagaattgtgcgtaagatggactcaactgggcgccttctacccttttatgcgcaatcacaactcactgacatctttgcctcaagaaccgtactcatttagtgagccagcacagcaggccatgaggaaggctcttggcctgagatatgcacttctgccgcatctgtacacccttttccaccaggctcatgtccatggagagactgttgcacgacctctgttcttggagttcccaaaagactcttccacgtggacagtcgatcaccagatgctgtggggcgaggctctgctgattacacctgtattgcaacctggtaaggccgaagttaccgggtactttccattggggacctggtatgatctgcaaacagtcccggttgaagctcttggaagtcttccacctccacctgctgcaccaagggagcctgcgatccactctgaaggacagtgggtaactttgcctgcaccgctggacaccatcaatgtccatctgcgcgaaggctacatcataccacttcaaggtcctggactgaccactacagagtctagaaaacaaccaatggctcttgctgttgcactgactaaaagcggcgaagcaaggggtgagctgttctgggacgacggagagtcactggaggtactcgaacgaggcgcgtatacgcaggtcatttttgaggctcgcaataatacgatcgttaacgagctggtccacgtcacttcagaaggtgcaggccttcagttgggcaaggtaactgtcctgggagttgctacagcaccgcagcaggtcttgtccaacggacggcccgtaagcaactttacctatagtcctgataccaaagttctggacatctgcgttgctctgctgatgggtgagcagttcctggtatcatggtgc

SEQ ID NO: 62 - protein, 944 aa, synthetic construct
  REGION 1..944: note = Variant of the Homo Sapiens Lysosomal alpha-glucosidase
MEWSWVFLFFLSVTTGVHSGHILWHDFSTVPRELSGSSQVLEETHPAHQVGASRPGPRDAQLHPGRPRAVPTQCDVPENSRFDCAPEKAITQEQCEARGCCYIPAKQGLQGAQMGQPWCFFPPSYPSYKLENLSQSEMGYTATLTRTTPSFFPKDILTLRLDVMMETENRLHFTIKDPANRRYEVPLETPHVHSRAPSPLYSVEFSEEPFGVIVRRQLDGRVLLNTTVAPLFFADQFLQLSTSLPSQYITGLAEHLSPLMLSTSWNKITLWNRDLAPTPGANLYGSHPFYLALEDGGSAHGVFLLNSNAMDVVLQPSPALSWRSTGGILDVYIFLGPEPKSVVQQYLDVVGYPFMPPYWGLGFHLCRWGYSSTAITRQVVENMTRAHFPLDVQWNDLDYMDSRRDFTFNKDGFRDFPAMVQELHQGGRRYMMIVDPGISSSGPAGSYRPYDEGLRRGVFITNETGQPLIGKVWPGSTAFPDFTNPEALAWWEDMVAEFHDQVPFDGMWIDMNEPSNFIRGSVDGCPNNELENPPYVPGVVGGTLQAATICASSHQFLSTHYNLHNLYGGTEAIASHRALVKARGTRPFVISRSTFAGHGRYAGHWTGDVWSSWEQLASSVPEILQFNLLGVPLVGADVCGFLGNTSEELCVRWTQLGAFYPFMRNHNSLTSLPQEPYSFSEPAQQAMRKALGLRYALLPHLYTLFHQAHVHGETVARPLFLEFPKDSSTWTVDHQMLWGEALLITPVLQPGKAEVTGYFPLGTWYDLQTVPVEALGSLPPPPAAPREPAIHSEGQWVTLPAPLDTINVHLREGYIIPLQGPGLTTTESRKQPMALAVALTKSGEARGELFWDDGESLEVLERGAYTQVIFEARNNTIVNELVHVTSEGAGLQLGKVTVLGVATAPQQVLSNGRPVSNFTYSPDTKVLDICVALLMGEQFLVSWC

SEQ ID NO: 63 - DNA, 2832 bp, synthetic construct
  misc_feature 1..2832: note = Variant of the Homo Sapiens Lysosomal alpha-glucosidase
  source 1..2832: mol_type = other DNA
atggaatggagctgggtctttctcttcttcctgtcagtaacgactggtgtccactccggacacattctgtggcatgatttttctaccgtgcctagagagctttccggttcaagtcaagtcctcgaagaaacacatccagcccatcaggttggcgcatctaggccgggccctcgggacgctcaactccacccagggagacctagggccgttcccactcagtgcgacgtgccagagaactcacgcttcgattgtgcacctgagaaggctatcacgcaagagcagtgcgaggcccgcggatgttgttacataccggctaaacaggggctgcagggtgcgcagatgggccaaccttggtgcttcttcccaccatcctatccgagttacaagctggagaatctctcccagtctgaaatgggatataccgcaacactgactcggaccaccccctccttctttcccaaagatatcttgactctgagacttgacgtaatgatggagacagaaaacaggctccactttaccattaaggaccctgccaatcgccgatacgaggtgcctctggaaacaccacacgtgcacagtagagctccatcacctctgtattctgtcgagttctccgaagagccgtttggcgttatcgtcaggaggcagctcgacgggcgagtgcttctgaacacgactgtggccccgttgttctttgcggatcagtttctgcaactgtcaacaagtctcccttctcagtacattaccgggcttgcagagcatctgtccccactcatgctgagtacttcatggaacaaaatcacactgtggaatagagaccttgctcctactccaggagccaacttgtatggttctcaccctttctacttggccctggaagatggcggatcagcgcatggcgtattcctcctgaattccaacgcaatggacgttgttcttcagccatctcctgctttgagttggagatctacaggcgggatactggacgtctacatctttctgggtccagagcctaaatccgtagtgcagcagtatcttgatgtcgtcggatacccgtttatgccaccatattggggcctggggttccacttgtgccgctggggatattcatccaccgccattacacgacaagttgttgagaatatgaccagggcacattttcctctggatgtacagtggaacgacctggactacatggatagtcgccgcgacttcaccttcaataaggatgggttcagagactttcctgctatggtccaagaacttcaccagggaggcaggaggtacatgatgatcgtagatccgggaatttcttcttctggcccagccggttcatacagaccgtatgacgaaggactgcgacgaggcgtctttatcacgaacgagactggtcagcctttgataggcaaggtttggccagggtccaccgctttcccggatttcacaaatcctgaggcactggcctggtgggaagatatggtcgccgagtttcacgaccaggtcccatttgacgggatgtggatcgacatgaacgagccatccaacttcattagaggaagtgtggatggctgtccgaataatgagctggaaaaccctccttacgtaccaggcgttgttggtgggactcttcaagctgcgacgatttgcgcatcctcccatcagttcctgtcaacccactataacttgcacaatctgtacgggacaacagaggctatcgccagtcatagggccctggtaaaagctagaggaacacgccctttcgttatctctcgctcaacttttgcaggccacggtaggtatgccggacattggaccggcgacgtctggagttcttgggaacagctggcttcctccgttccagagatattgcagtttaacctgttgggagtcccacttgtaggtgcagatgtttgtggcttcctggggaacacctcagaagaattgtgcgtaagatggactcaactgggcgccttctacccttttatgcgcaatcacaactcactgacatctttgcctcaagaaccgtactcatttagtgagccagcacagcaggccatgaggaaggctcttaggctgagatatgcacttctgccgcatctgtacacccttttccaccaggctcatgtccatggagagactgttgcacgacctctgttcttggagttcccaaaagactcttccacgtggacagtcgatcaccagatgctgtggggcgaggctctgctgattacacctgtattgcaacctggtaaggccgaagttaccgggtactttccattggggacctggtatgatctgcaaacagtcccggttgaagctcttggaagtcttccacctccacctgctgcaccaagggagcctgcgatccactctgaaggacagtgggtaactttgcctgcaccgctggacaccatcaatgtccatctgcgcgaaggctacatcataccacttcaaggtcctggactgaccactacagagtctagaaaacaaccaatggctcttgctgttgcactgactaaaagcggcgaagcaaggggtgagctgttctgggacgacggagagtcactggaggtactcgaacgaggcgcgtatacgcaggtcatttttgaggctcgcaataatacgatcgttaacgagctggtccacgtcacttcagaaggtgcaggccttcagttgggcaaggtaactgtcctgggagttgctacagcaccgcagcaggtcttgtccaacggacggcccgtaagcaactttacctatagtcctgataccaaagttctggacatctgcgttgctctgctgatgggtgagcagttcctggtatcatggtgc

SEQ ID NO: 64 - protein, 944 aa, synthetic construct
  REGION 1..944: note = Variant of the Homo Sapiens Lysosomal alpha-glucosidase
MEWSWVFLFFLSVTTGVHSGHILWHDFSTVPRELSGSSQVLEETHPAHQVGASRPGPRDAQLHPGRPRAVPTQCDVPENSRFDCAPEKAITQEQCEARGCCYIPAKQGLQGAQMGQPWCFFPPSYPSYKLENLSQSEMGYTATLTRTTPSFFPKDILTLRLDVMMETENRLHFTIKDPANRRYEVPLETPHVHSRAPSPLYSVEFSEEPFGVIVRRQLDGRVLLNTTVAPLFFADQFLQLSTSLPSQYITGLAEHLSPLMLSTSWNKITLWNRDLAPTPGANLYGSHPFYLALEDGGSAHGVFLLNSNAMDVVLQPSPALSWRSTGGILDVYIFLGPEPKSVVQQYLDVVGYPFMPPYWGLGFHLCRWGYSSTAITRQVVENMTRAHFPLDVQWNDLDYMDSRRDFTFNKDGFRDFPAMVQELHQGGRRYMMIVDPGISSSGPAGSYRPYDEGLRRGVFITNETGQPLIGKVWPGSTAFPDFTNPEALAWWEDMVAEFHDQVPFDGMWIDMNEPSNFIRGSVDGCPNNELENPPYVPGVVGGTLQAATICASSHQFLSTHYNLHNLYGTTEAIASHRALVKARGTRPFVISRSTFAGHGRYAGHWTGDVWSSWEQLASSVPEILQFNLLGVPLVGADVCGFLGNTSEELCVRWTQLGAFYPFMRNHNSLTSLPQEPYSFSEPAQQAMRKALRLRYALLPHLYTLFHQAHVHGETVARPLFLEFPKDSSTWTVDHQMLWGEALLITPVLQPGKAEVTGYFPLGTWYDLQTVPVEALGSLPPPPAAPREPAIHSEGQWVTLPAPLDTINVHLREGYIIPLQGPGLTTTESRKQPMALAVALTKSGEARGELFWDDGESLEVLERGAYTQVIFEARNNTIVNELVHVTSEGAGLQLGKVTVLGVATAPQQVLSNGRPVSNFTYSPDTKVLDICVALLMGEQFLVSWC

SEQ ID NO: 65 - DNA, 2832 bp, synthetic construct
  misc_feature 1..2832: note = Variant of the Homo Sapiens Lysosomal alpha-glucosidase
  source 1..2832: mol_type = other DNA
atggaatggagctgggtctttctcttcttcctgtcagtaacgactggtgtccactccggacacattctgtggcatgatttttctaccgtgcctagagagctttccggttcaagtcaagtcctcgaagaaacacatccagcccatcaggttggcgcatctaggccgggccctcgggacgctcaactccacccagggagacctagggccgttcccactcagtgcgacgtgccagagaactcacgcttcgattgtgcacctgagaaggctatcacgcaagagcagtgcgaggcccgcggatgttgttacataccggctaaacaggggctgcagggtgcgcagatgggccaaccttggtgcttcttcccaccatcctatccgagttacaagctggagaatctctcccagtctgaaatgggatataccgcaacactgactcggaccaccccctccttctttcccaaagatatcttgactctgagacttgacgtaatgatggagacagaaaacaggctccactttaccattaaggaccctgccaatcgccgatacgaggtgcctctggaaacaccacacgtgcacagtagagctccatcacctctgtattctgtcgagttctccgaagagccgtttggcgttatcgtcaggaggcagctcgacgggcgagtgcttctgaacacgactgtggccccgttgttctttgcggatcagtttctgcaactgtcaacaagtctcccttctcagtacattaccgggcttgcagagcatctgtccccactcatgctgagtacttcatggaacaaaatcacactgtggaatagagaccttgctcctactccaggagccaacttgtatggttctcaccctttctacttggccctggaagatggcggatcagcgcatggcgtattcctcctgaattccaacgcaatggacgttgttcttcagccatctcctgctttgagttggagatctacaggcgggatactggacgtctacatctttctgggtccagagcctaaatccgtagtgcagcagtatcttgatgtcgtcggatacccgtttatgccaccatattggggcctggggttccacttgtgccgctggggatattcatccaccgccattacacgacaagttgttgagaatatgaccagggcacattttcctctggatgtacagtggaacgacctggactacatggatagtcgccgcgacttcaccttcaataaggatgggttcagagactttcctgctatggtccaagaacttcaccagggaggcaggaggtacatgatgatcgtagatccgggaatttcttcttctggcccagccggttcatacagaccgtatgacgaaggactgcgacgaggcgtctttatcacgaacgagactggtcagcctttgataggcaaggtttggccagggtccaccgctttcccggatttcacaaatcctgaggcactggcctggtgggaagatatggtcgccgagtttcacgaccaggtcccatttgacgggatgtggatcgacatgaacgagccatccaacttcattagaggaagtgtggatggctgtccgaataatgagctggaaaaccctccttacgtaccaggcgttgttggtgggactcttcaagctgcgacgatttgcgcatcctcccatcagttcctgtcaacccactataacttgcacaatctgtacgggacaacagaggctatcgccagtcatagggccctggtaaaagctagaggaacacgccctttcgttatctctcgctcaacttttgcaggccacggtaggtatgccggacattggaccggcgacgtctggagttcttgggaacagctggcttcctccgttccagagatattgcagtttaacctgttgggagtcccacttgtaggtgcagatgtttgtggcttcctggggaacacctcagaagaattgtgcgtaagatggactcaactgggcgccttctacccttttatgcgcaatcacaactcactgacatctttgcctcaagaaccgtactcatttagtgagccagcacagcaggccatgaggaaggctcttggcctgagatatgcacttctgccgcatctgtacacccttttccaccaggctcatgtccatggagagactgttgcacgacctctgttcttggagttcccaaaagactcttccacgtggacagtcgatcaccagatgctgtggggcgaggctctgctgattacacctgtattgcaacctggtaaggccgaagttaccgggtactttccattggggacctggtatgatctgcaaacagtcccggttgaagctcttggaagtcttccacctccacctgctgcaccaagggagcctgcgatccactctgaaggacagtgggtaactttgcctgcaccgctggacaccatcaatgtccatctgcgcgaaggctacatcataccacttcaaggtcctggactgaccactacagagtctagaaatcaaccaatggctcttgctgttgcactgactaaaagcggcgaagcaaggggtgagctgttctgggacgacggagagtcactggaggtactcgaacgaggcgcgtatacgcaggtcatttttgaggctcgcaataatacgatcgttaacgagctggtccacgtcacttcagaaggtgcaggccttcagttgggcaaggtaactgtcctgggagttgctacagcaccgcagcaggtcttgtccaacggacggcccgtaagcaactttacctatagtcctgataccaaagttctggacatctgcgttgctctgctgatgggtgagcagttcctggtatcatggtgc

SEQ ID NO: 66 - protein, 944 aa, synthetic construct
  REGION 1..944: note = Variant of the Homo Sapiens Lysosomal alpha-glucosidase
MEWSWVFLFFLSVTTGVHSGHILWHDFSTVPRELSGSSQVLEETHPAHQVGASRPGPRDAQLHPGRPRAVPTQCDVPENSRFDCAPEKAITQEQCEARGCCYIPAKQGLQGAQMGQPWCFFPPSYPSYKLENLSQSEMGYTATLTRTTPSFFPKDILTLRLDVMMETENRLHFTIKDPANRRYEVPLETPHVHSRAPSPLYSVEFSEEPFGVIVRRQLDGRVLLNTTVAPLFFADQFLQLSTSLPSQYITGLAEHLSPLMLSTSWNKITLWNRDLAPTPGANLYGSHPFYLALEDGGSAHGVFLLNSNAMDVVLQPSPALSWRSTGGILDVYIFLGPEPKSVVQQYLDVVGYPFMPPYWGLGFHLCRWGYSSTAITRQVVENMTRAHFPLDVQWNDLDYMDSRRDFTFNKDGFRDFPAMVQELHQGGRRYMMIVDPGISSSGPAGSYRPYDEGLRRGVFITNETGQPLIGKVWPGSTAFPDFTNPEALAWWEDMVAEFHDQVPFDGMWIDMNEPSNFIRGSVDGCPNNELENPPYVPGVVGGTLQAATICASSHQFLSTHYNLHNLYGTTEAIASHRALVKARGTRPFVISRSTFAGHGRYAGHWTGDVWSSWEQLASSVPEILQFNLLGVPLVGADVCGFLGNTSEELCVRWTQLGAFYPFMRNHNSLTSLPQEPYSFSEPAQQAMRKALGLRYALLPHLYTLFHQAHVHGETVARPLFLEFPKDSSTWTVDHQMLWGEALLITPVLQPGKAEVTGYFPLGTWYDLQTVPVEALGSLPPPPAAPREPAIHSEGQWVTLPAPLDTINVHLREGYIIPLQGPGLTTTESRNQPMALAVALTKSGEARGELFWDDGESLEVLERGAYTQVIFEARNNTIVNELVHVTSEGAGLQLGKVTVLGVATAPQQVLSNGRPVSNFTYSPDTKVLDICVALLMGEQFLVSWC

SEQ ID NO: 67 - DNA, 2832 bp, synthetic construct
  misc_feature 1..2832: note = Variant of the Homo Sapiens Lysosomal alpha-glucosidase
  source 1..2832: mol_type = other DNA
atggaatggagctgggtctttctcttcttcctgtcagtaacgactggtgtccactccggacacattctgtggcatgatttttctaccgtgcctagagagctttccggttcaagtcaagtcctcgaagaaacacatccagcccatcaggttggcgcatctaggccgggccctcgggacgctcaactccacccagggagacctagggccgttcccactcagtgcgacgtgccagagaactcacgcttcgattgtgcacctgagaaggctatcacgcaagagcagtgcgaggcccgcggatgttgttacataccggctaaacaggggctgcagggtgcgcagatgggccaaccttggtgcttcttcccaccatcctatccgagttacaagctggagaatctctcccagtctgaaatgggatataccgcaacactgactcggaccaccccctccttctttcccaaagatatcttgactctgagacttgacgtaatgatggagacagaaaacaggctccactttaccattaaggaccctgccaatcgccgatacgaggtgcctctggaaacaccacacgtgcacagtagagctccatcacctctgtattctgtcgagttctccgaagagccgtttggcgttatcgtcaggaggcagctcgacgggcgagtgcttctgaacacgactgtggccccgttgttctttgcggatcagtttctgcaactgtcaacaagtctcccttctcagtacattaccgggcttgcagagcatctgtccccactcatgctgagtacttcatggaacaaaatcacactgtggaatagagaccttgctcctactccaggagccaacttgtatggttctcaccctttctacttggccctggaagatggcggatcagcgcatggcgtattcctcctgaattccaacgcaatggacgttgttcttcagccatctcctgctttgagttggagatctacaggcgggatactggacgtctacatctttctgggtccagagcctaaatccgtagtgcagcagtatcttgatgtcgtcggatacccgtttatgccaccatattggggcctggggttccacttgtgccgctggggatattcatccaccgccattacacgacaagttgttgagaatatgaccagggcacattttcctctggatgtacagtggaacgacctggactacatggatagtcgccgcgacttcaccttcaataaggatgggttcagagactttcctgctatggtccaagaacttcaccagggaggcaggaggtacatgatgatcgtagatccgggaatttcttcttctggcccagccggttcatacagaccgtatgacgaaggactgcgacgaggcgtctttatcacgaacgagactggtcagcctttgataggcaaggtttggccagggtccaccgctttcccggatttcacaaatcctgaggcactggcctggtgggaagatatggtcgccgagtttcacgaccaggtcccatttgacgggatgtggatcgacatgaacgagccatccaacttcattagaggaagtgtggatggctgtccgaataatgagctggaaaaccctccttacgtaccaggcgttgttggtgggactcttcaagctgcgacgatttgcgcatcctcccatcagttcctgtcaacccactataacttgcacaatctgtacgggacaacagaggctatcgccagtcatagggccctggtaaaagctagaggaacacgccctttcgttatctctcgctcaacttttgcaggccacggtaggtatgccggacattggaccggcgacgtctggagttcttgggaacagctggcttcctccgttccagagatattgcagtttaacctgttgggagtcccacttgtaggtgcagatgtttgtggcttcctggggaacacctcagaagaattgtgcgtaagatggactcaactgggcgccttctacccttttatgcgcaatcacaactcactgacatctttgcctcaagaaccgtactcatttagtgagccagcacagcaggccatgaggaaggctcttggcctgagatatgcacttctgccgcatctgtacacccttttccaccaggctcatgtccatggagagactgttgcacgacctctgttcttggagttcccaaaagactcttccacgtggacagtcgatcaccagatgctgtggggcgaggctctgctgattacacctgtattgcaacctggtaaggccgaagttaccgggtactttccattggggacctggtatgatctgcaaacagtcccggttgaagctcttggaagtcttccacctccacctgctgcaccaagggagcctgcgatccactctgaaggacagtgggtaactttgcctgcaccgctggacaccatcaatgtccatctgcgcgaaggctacatcataccacttcaaggtcctggactgaccactacagagtctagaaaacaaccaatggctcttgctgttgcactgactaaaagcggcgaagcaaggggtgagctgttctgggacgacggagagtcactggaggtactcgaacgaggcgcgtatacgcaggtcatttttgaggctcgcaataatacgatcgttaacgagctggtccacgtcacttcagaaggtgcaggccttcagttgcggaaggtaactgtcctgggagttgctacagcaccgcagcaggtcttgtccaacggacggcccgtaagcaactttacctatagtcctgataccaaagttctggacatctgcgttgctctgctgatgggtgagcagttcctggtatcatggtgc

SEQ ID NO: 68 - protein, 944 aa, synthetic construct
  REGION 1..944: note = Variant of the Homo Sapiens Lysosomal alpha-glucosidase
MEWSWVFLFFLSVTTGVHSGHILWHDFSTVPRELSGSSQVLEETHPAHQVGASRPGPRDAQLHPGRPRAVPTQCDVPENSRFDCAPEKAITQEQCEARGCCYIPAKQGLQGAQMGQPWCFFPPSYPSYKLENLSQSEMGYTATLTRTTPSFFPKDILTLRLDVMMETENRLHFTIKDPANRRYEVPLETPHVHSRAPSPLYSVEFSEEPFGVIVRRQLDGRVLLNTTVAPLFFADQFLQLSTSLPSQYITGLAEHLSPLMLSTSWNKITLWNRDLAPTPGANLYGSHPFYLALEDGGSAHGVFLLNSNAMDVVLQPSPALSWRSTGGILDVYIFLGPEPKSVVQQYLDVVGYPFMPPYWGLGFHLCRWGYSSTAITRQVVENMTRAHFPLDVQWNDLDYMDSRRDFTFNKDGFRDFPAMVQELHQGGRRYMMIVDPGISSSGPAGSYRPYDEGLRRGVFITNETGQPLIGKVWPGSTAFPDFTNPEALAWWEDMVAEFHDQVPFDGMWIDMNEPSNFIRGSVDGCPNNELENPPYVPGVVGGTLQAATICASSHQFLSTHYNLHNLYGTTEAIASHRALVKARGTRPFVISRSTFAGHGRYAGHWTGDVWSSWEQLASSVPEILQFNLLGVPLVGADVCGFLGNTSEELCVRWTQLGAFYPFMRNHNSLTSLPQEPYSFSEPAQQAMRKALGLRYALLPHLYTLFHQAHVHGETVARPLFLEFPKDSSTWTVDHQMLWGEALLITPVLQPGKAEVTGYFPLGTWYDLQTVPVEALGSLPPPPAAPREPAIHSEGQWVTLPAPLDTINVHLREGYIIPLQGPGLTTTESRKQPMALAVALTKSGEARGELFWDDGESLEVLERGAYTQVIFEARNNTIVNELVHVTSEGAGLQLRKVTVLGVATAPQQVLSNGRPVSNFTYSPDTKVLDICVALLMGEQFLVSWC

SEQ ID NO: 69 - DNA, 2832 bp, synthetic construct
  misc_feature 1..2832: note = Variant of the Homo Sapiens Lysosomal alpha-glucosidase
  source 1..2832: mol_type = other DNA
atggaatggagctgggtctttctcttcttcctgtcagtaacgactggtgtccactccggacacattctgtggcatgatttttctaccgtgcctagagagctttccggttcaagtcaagtcctcgaagaaacacatccagcccatcaggttggcgcatctaggccgggccctcgggacgctcaactccacccagggagacctagggccgttcccactcagtgcgacgtgccagagaactcacgcttcgattgtgcacctgagaaggctatcacgcaagagcagtgcgaggcccgcggatgttgttacataccggctaaacaggggctgcagggtgcgcagatgggccaaccttggtgcttcttcccaccatcctatccgagttacaagctggagaatctctcccagtctgaaatgggatataccgcaacactgactcggaccaccccctccttctttcccaaagatatcttgactctgagacttgacgtaatgatggagacagaaaacaggctccactttaccattaaggaccctgccaatcgccgatacgaggtgcctctggaaacaccacacgtgcacagtagagctccatcacctctgtattctgtcgagttctccgaagagccgtttggcgttatcgtcaggaggcagctcgacgggcgagtgcttctgaacacgactgtggccccgttgttctttgcggatcagtttctgcaactgtcaacaagtctcccttctcagtacattaccgggcttgcagagcatctgtccccactcatgctgagtacttcatggaacacgatcacactgtggaatagagaccttgctcctactccaggagccaacttgtatggttctcaccctttctacttggccctggaagatggcggatcagcgcatggcgtattcctcctgaattccaacgcaatggacgttgttcttcagccatctcctgctttgagttggagatctacaggcgggatactggacgtctacatctttctgggtccagagcctaaatccgtagtgcagcagtatcttgatgtcgtcggatacccgtttatgccaccatattggggcctggggttccacttgtgccgctggggatattcatccaccgccattacacgacaagttgttgagaatatgaccagggcacattttcctctggatgtacagtggaacgacctggactacatggatagtcgccgcgacttcaccttcaataaggatgggttcagagactttcctgctatggtccaagaacttcaccagggaggcaggaggtacatgatgatcgtagatccgggaatttcttcttctggcccagccggttcatacagaccgtatgacgaaggactgcgacgaggcgtctttatcacgaacgagactggtcagcctttgataggcaaggtttggccagggtccaccgctttcccggatttcacaaatcctgaggcactggcctggtgggaagatatggtcgccgagtttcacgaccaggtcccatttgacgggatgtggatcgacatgaacgagccatccaacttcattagaggaagtgtggatggctgtccgaataatgagctggaaaaccctccttacgtaccaggcgttgttggtgggactcttcaagctgcgacgatttgcgcatcctcccatcagttcctgtcaacccactataacttgcacaatctgtacgggacaacagaggctatcgccagtcatagggccctggtaaaagctagaggaacacgccctttcgttatctctcgctcaacttttgcaggccacggtaggtatgccggacattggaccggcgacgtctggagttcttgggaacagctggcttcctccgttccagagatattgcagtttaacctgttgggagtcccacttgtaggtgcagatgtttgtggcttcctggggaacacctcagaagaattgtgcgtaagatggactcaactgggcgccttctacccttttatgcgcaatcacaactcactgacatctttgcctcaagaaccgtactcatttagtgagccagcacagcaggccatgaggaaggctcttggcctgagatatgcacttctgccgcatctgtacacccttttccaccaggctcatgtccatggagagactgttgcacgacctctgttcttggagttcccaaaagactcttccacgtggacagtcgatcaccagatgctgtggggcgaggctctgctgattacacctgtattgcaacctggtaaggccgaagttaccgggtactttccattggggacctggtatgatctgcaaacagtcccggttgaagctcttggaagtcttccacctccacctgctgcaccaagggagcctgcgatccactctgaaggacagtgggtaactttgcctgcaccgctggacaccatcaatgtccatctgcgcgaaggctacatcataccacttcaaggtcctggactgaccactacagagtctagaaaacaaccaatggctcttgctgttgcactgactaaaagcggcgaagcaaggggtgagctgttctgggacgacggagagtcactggaggtactcgaacgaggcgcgtatacgcaggtcatttttgaggctcgcaataatacgatcgttaacgagctggtccacgtcacttcagaaggtgcaggccttcagttgggcaaggtaactgtcctgggagttgctacagcaccgcagcaggtcttgtccaacggacggcccgtaagcaactttacctatagtcctgataccaaagttctggacatctgcgttgctctgctgatgggtgagcagttcctggtatcatggtgc

SEQ ID NO: 70 - protein, 944 aa, synthetic construct
  REGION 1..944: note = Variant of the Homo Sapiens Lysosomal alpha-glucosidase
MEWSWVFLFFLSVTTGVHSGHILWHDFSTVPRELSGSSQVLEETHPAHQVGASRPGPRDAQLHPGRPRAVPTQCDVPENSRFDCAPEKAITQEQCEARGCCYIPAKQGLQGAQMGQPWCFFPPSYPSYKLENLSQSEMGYTATLTRTTPSFFPKDILTLRLDVMMETENRLHFTIKDPANRRYEVPLETPHVHSRAPSPLYSVEFSEEPFGVIVRRQLDGRVLLNTTVAPLFFADQFLQLSTSLPSQYITGLAEHLSPLMLSTSWNTITLWNRDLAPTPGANLYGSHPFYLALEDGGSAHGVFLLNSNAMDVVLQPSPALSWRSTGGILDVYIFLGPEPKSVVQQYLDVVGYPFMPPYWGLGFHLCRWGYSSTAITRQVVENMTRAHFPLDVQWNDLDYMDSRRDFTFNKDGFRDFPAMVQELHQGGRRYMMIVDPGISSSGPAGSYRPYDEGLRRGVFITNETGQPLIGKVWPGSTAFPDFTNPEALAWWEDMVAEFHDQVPFDGMWIDMNEPSNFIRGSVDGCPNNELENPPYVPGVVGGTLQAATICASSHQFLSTHYNLHNLYGTTEAIASHRALVKARGTRPFVISRSTFAGHGRYAGHWTGDVWSSWEQLASSVPEILQFNLLGVPLVGADVCGFLGNTSEELCVRWTQLGAFYPFMRNHNSLTSLPQEPYSFSEPAQQAMRKALGLRYALLPHLYTLFHQAHVHGETVARPLFLEFPKDSSTWTVDHQMLWGEALLITPVLQPGKAEVTGYFPLGTWYDLQTVPVEALGSLPPPPAAPREPAIHSEGQWVTLPAPLDTINVHLREGYIIPLQGPGLTTTESRKQPMALAVALTKSGEARGELFWDDGESLEVLERGAYTQVIFEARNNTIVNELVHVTSEGAGLQLGKVTVLGVATAPQQVLSNGRPVSNFTYSPDTKVLDICVALLMGEQFLVSWC

SEQ ID NO: 71 - DNA, 2832 bp, synthetic construct
  misc_feature 1..2832: note = Variant of the Homo Sapiens Lysosomal alpha-glucosidase
  source 1..2832: mol_type = other DNA
atggaatggagctgggtctttctcttcttcctgtcagtaacgactggtgtccactccggacacattctggagcatgatttttctaccgtgcctagagagctttccggttcaagtcaagtcctcgaagaaacacatccagcccatcaggttggcgcatctaggccgggccctcgggacgctcaactccacccagggagacctagggccgttcccactcagtgcgacgtgccagagaactcacgcttcgattgtgcacctgagaaggctatcacgcaagagcagtgcgaggcccgcggatgttgttacataccggctaaacaggggctgcagggtgcgcagatgggccaaccttggtgcttcttcccaccatcctatccgagttacaagctggagaatctctcccagtctgaaatgggatataccgcaacactgactcggaccaccccctccttctttcccaaagatatcttgactctgagacttgacgtaatgatggagacagaaaacaggctccactttaccattaaggaccctgccaatcgccgatacgaggtgcctctggaaacaccacacgtgcacagtagagctccatcacctctgtattctgtcgagttctccgaagagccgtttggcgttatcgtcaggaggcagctcgacgggcgagtgcttctgaacacgactgtggccccgttgttctttgcggatcagtttctgcaactgtcaacaagtctcccttctcagtacattaccgggcttgcagagcatctgtccccactcatgctgagtacttcatggaacaaaatcacactgtggaatagagaccttgctcctactccaggagccaacttgtatggttctcaccctttctacttggccctggaagatggcggatcagcgcatggcgtattcctcctgaattccaacgcaatggacgttgttcttcagccatctcctgctttgagttggagatctacaggcgggatactggacgtctacatctttctgggtccagagcctaaatccgtagtgcagcagtatcttgatgtcgtcggatacccgtttatgccaccatattggggcctggggttccacttgtgccgctggggatattcatccaccgccattacacgacaagttgttgagaatatgaccagggcacattttcctctggatgtacagtggaacgacctggactacatggatagtcgccgcgacttcaccttcaataaggatgggttcagagactttcctgctatggtccaagaacttcaccagggaggcaggaggtacatgatgatcgtagatccgggaatttcttcttctggcccagccggttcatacagaccgtatgacgaaggactgcgacgaggcgtctttatcacgaacgagactggtcagcctttgataggcaaggtttggccagggtccaccgctttcccggatttcacaaatcctgaggcactggcctggtgggaagatatggtcgccgagtttcacgaccaggtcccatttgacgggatgtggatcgacatgaacgagccatccaacttcattagaggaagtgtggatggctgtccgaataatgagctggaaaaccctccttacgtaccaggcgttgttggtgggactcttcaagctgcgacgatttgcgcatcctcccatcagttcctgtcaacccactataacttgcacaatctgtacgggacaacagaggctatcgccagtcatagggccctggtaaaagctagaggaacacgccctttcgttatctctcgctcaacttttgcaggccacggtaggtatgccggacattggaccggcgacgtctggagttcttgggaacagctggcttcctccgttccagagatattgcagtttaacctgttgggagtcccacttgtaggtgcagatgtttgtggcttcctggggaacacctcagaagaattgtgcgtaagatggactcaactgggcgccttctacccttttatgcgcaatcacaactcactgacatctttgcctcaagaaccgtactcatttagtgagccagcacagcaggccatgaggaaggctcttggcctgagatatgcacttctgccgcatctgtacacccttttccaccaggctcatgtccatggagagactgttgcacgacctctgttcttggagttcccaaaagactcttccacgtggacagtcgatcaccagatgctgtggggcgaggctctgctgattacacctgtattgcaacctggtaaggccgaagttaccgggtactttccattggggacctggtatgatctgcaaacagtcccggttgaagctcttggaagtcttccacctccacctgctgcaccaagggagcctgcgatccactctgaaggacagtgggtaactttgcctgcaccgctggacaccatcaatgtccatctgcgcgaaggctacatcataccacttcaaggtcctggactgaccactacagagtctagaaaacaaccaatggctcttgctgttgcactgactaaaagcggcgaagcaaggggtgagctgttctgggacgacggagagtcactggaggtactcgaacgaggcgcgtatacgcaggtcatttttgaggctcgcaataatacgatcgttaacgagctggtccacgtcacttcagaaggtgcaggccttcagttgggcaaggtaactgtcctgggagttgctacagcaccgcagcaggtcttgtccaacggacggcccgtaagcaactttacctatagtcctgataccaaagttctggacatctgcgttgctctgctgatgggtgagcagttcctggtatcatggtgc

SEQ ID NO: 72 - protein, 944 aa, synthetic construct
  REGION 1..944: note = Variant of the Homo Sapiens Lysosomal alpha-glucosidase
MEWSWVFLFFLSVTTGVHSGHILEHDFSTVPRELSGSSQVLEETHPAHQVGASRPGPRDAQLHPGRPRAVPTQCDVPENSRFDCAPEKAITQEQCEARGCCYIPAKQGLQGAQMGQPWCFFPPSYPSYKLENLSQSEMGYTATLTRTTPSFFPKDILTLRLDVMMETENRLHFTIKDPANRRYEVPLETPHVHSRAPSPLYSVEFSEEPFGVIVRRQLDGRVLLNTTVAPLFFADQFLQLSTSLPSQYITGLAEHLSPLMLSTSWNKITLWNRDLAPTPGANLYGSHPFYLALEDGGSAHGVFLLNSNAMDVVLQPSPALSWRSTGGILDVYIFLGPEPKSVVQQYLDVVGYPFMPPYWGLGFHLCRWGYSSTAITRQVVENMTRAHFPLDVQWNDLDYMDSRRDFTFNKDGFRDFPAMVQELHQGGRRYMMIVDPGISSSGPAGSYRPYDEGLRRGVFITNETGQPLIGKVWPGSTAFPDFTNPEALAWWEDMVAEFHDQVPFDGMWIDMNEPSNFIRGSVDGCPNNELENPPYVPGVVGGTLQAATICASSHQFLSTHYNLHNLYGTTEAIASHRALVKARGTRPFVISRSTFAGHGRYAGHWTGDVWSSWEQLASSVPEILQFNLLGVPLVGADVCGFLGNTSEELCVRWTQLGAFYPFMRNHNSLTSLPQEPYSFSEPAQQAMRKALGLRYALLPHLYTLFHQAHVHGETVARPLFLEFPKDSSTWTVDHQMLWGEALLITPVLQPGKAEVTGYFPLGTWYDLQTVPVEALGSLPPPPAAPREPAIHSEGQWVTLPAPLDTINVHLREGYIIPLQGPGLTTTESRKQPMALAVALTKSGEARGELFWDDGESLEVLERGAYTQVIFEARNNTIVNELVHVTSEGAGLQLGKVTVLGVATAPQQVLSNGRPVSNFTYSPDTKVLDICVALLMGEQFLVSWC

SEQ ID NO: 73 - DNA, 2832 bp, synthetic construct
  misc_feature 1..2832: note = Variant of the Homo Sapiens Lysosomal alpha-glucosidase
  source 1..2832: mol_type = other DNA
atggaatggagctgggtctttctcttcttcctgtcagtaacgactggtgtccactccggacacattctgtggcatgatttttctaccgtgcctagagagctttccggttcaagtcaagtcctcgaagaaacacatccagcccatcaggttggcgcatctaggccgggccctcgggacgctcaactccacccagggagacctagggccgttcccactcagtgcgacgtgccagagaactcacgcttcgattgtgcacctgagaaggctatcacgcaagagcagtgcgaggcccgcggatgttgttacataccggctaaacaggggctgcagggtgcgcagatgggccaaccttggtgcttcttcccaccatcctatccgagttacaagctggagaatctctccggttctgaaatgggatataccgcaacactgactcggaccaccccctccttctttcccaaagatatcttgactctgagacttgacgtaatgatggagacagaaaacaggctccactttaccattaaggaccctgccaatcgccgatacgaggtgcctctggaaacaccacacgtgcacagtagagctccatcacctctgtattctgtcgagttctccgaagagccgtttggcgttatcgtcaggaggcagctcgacgggcgagtgcttctgaacacgactgtggccccgttgttctttgcggatcagtttctgcaactgtcaacaagtctcccttctcagtacattaccgggcttgcagagcatctgtccccactcatgctgagtacttcatggaacaaaatcacactgtggaatagagaccttgctcctactccaggagccaacttgtatggttctcaccctttctacttggccctggaagatggcggatcagcgcatggcgtattcctcctgaattccaacgcaatggacgttgttcttcagccatctcctgctttgagttggagatctacaggcgggatactggacgtctacatctttctgggtccagagcctaaatccgtagtgcagcagtatcttgatgtcgtcggatacccgtttatgccaccatattggggcctggggttccacttgtgccgctggggatattcatccaccgccattacacgacaagttgttgagaatatgaccagggcacattttcctctggatgtacagtggaacgacctggactacatggatagtcgccgcgacttcaccttcaataaggatgggttcagagactttcctgctatggtccaagaacttcaccagggaggcaggaggtacatgatgatcgtagatccgggaatttcttcttctggcccagccggttcatacagaccgtatgacgaaggactgcgacgaggcgtctttatcacgaacgagactggtcagcctttgataggcaaggtttggccagggtccaccgctttcccggatttcacaaatcctgaggcactggcctggtgggaagatatggtcgccgagtttcacgaccaggtcccatttgacgggatgtggatcgacatgaacgagccatccaacttcattagaggaagtgtggatggctgtccgaataatgagctggaaaaccctccttacgtaccaggcgttgttggtgggactcttcaagctgcgacgatttgcgcatcctcccatcagttcctgtcaacccactataacttgcacaatctgtacgggacaacagaggctatcgccagtcatagggccctggtaaaagctagaggaacacgccctttcgttatctctcgctcaacttttgcaggccacggtaggtatgccggacattggaccggcgacgtctggagttcttgggaacagctggcttcctccgttccagagatattgcagtttaacctgttgggagtcccacttgtaggtgcagatgtttgtggcttcctggggaacacctcagaagaattgtgcgtaagatggactcaactgggcgccttctacccttttatgcgcaatcacaactcactgacatctttgcctcaagaaccgtactcatttagtgagccagcacagcaggccatgaggaaggctcttggcctgagatatgcacttctgccgcatctgtacacccttttccaccaggctcatgtccatggagagactgttgcacgacctctgttcttggagttcccaaaagactcttccacgtggacagtcgatcaccagatgctgtggggcgaggctctgctgattacacctgtattgcaacctggtaaggccgaagttaccgggtactttccattggggacctggtatgatctgcaaacagtcccggttgaagctcttggaagtcttccacctccacctgctgcaccaagggagcctgcgatccactctgaaggacagtgggtaactttgcctgcaccgctggacaccatcaatgtccatctgcgcgaaggctacatcataccacttcaaggtcctggactgaccactacagagtctagaaaacaaccaatggctcttgctgttgcactgactaaaagcggcgaagcaaggggtgagctgttctgggacgacggagagtcactggaggtactcgaacgaggcgcgtatacgcaggtcatttttgaggctcgcaataatacgatcgttaacgagctggtccacgtcacttcagaaggtgcaggccttcagttgggcaaggtaactgtcctgggagttgctacagcaccgcagcaggtcttgtccaacggacggcccgtaagcaactttacctatagtcctgataccaaagttctggacatctgcgttgctctgctgatgggtgagcagttcctggtatcatggtgc

SEQ ID NO: 74 - protein, 944 aa, synthetic construct
  REGION 1..944: note = Variant of the Homo Sapiens Lysosomal alpha-glucosidase
MEWSWVFLFFLSVTTGVHSGHILWHDFSTVPRELSGSSQVLEETHPAHQVGASRPGPRDAQLHPGRPRAVPTQCDVPENSRFDCAPEKAITQEQCEARGCCYIPAKQGLQGAQMGQPWCFFPPSYPSYKLENLSGSEMGYTATLTRTTPSFFPKDILTLRLDVMMETENRLHFTIKDPANRRYEVPLETPHVHSRAPSPLYSVEFSEEPFGVIVRRQLDGRVLLNTTVAPLFFADQFLQLSTSLPSQYITGLAEHLSPLMLSTSWNKITLWNRDLAPTPGANLYGSHPFYLALEDGGSAHGVFLLNSNAMDVVLQPSPALSWRSTGGILDVYIFLGPEPKSVVQQYLDVVGYPFMPPYWGLGFHLCRWGYSSTAITRQVVENMTRAHFPLDVQWNDLDYMDSRRDFTFNKDGFRDFPAMVQELHQGGRRYMMIVDPGISSSGPAGSYRPYDEGLRRGVFITNETGQPLIGKVWPGSTAFPDFTNPEALAWWEDMVAEFHDQVPFDGMWIDMNEPSNFIRGSVDGCPNNELENPPYVPGVVGGTLQAATICASSHQFLSTHYNLHNLYGTTEAIASHRALVKARGTRPFVISRSTFAGHGRYAGHWTGDVWSSWEQLASSVPEILQFNLLGVPLVGADVCGFLGNTSEELCVRWTQLGAFYPFMRNHNSLTSLPQEPYSFSEPAQQAMRKALGLRYALLPHLYTLFHQAHVHGETVARPLFLEFPKDSSTWTVDHQMLWGEALLITPVLQPGKAEVTGYFPLGTWYDLQTVPVEALGSLPPPPAAPREPAIHSEGQWVTLPAPLDTINVHLREGYIIPLQGPGLTTTESRKQPMALAVALTKSGEARGELFWDDGESLEVLERGAYTQVIFEARNNTIVNELVHVTSEGAGLQLGKVTVLGVATAPQQVLSNGRPVSNFTYSPDTKVLDICVALLMGEQFLVSWC

SEQ ID NO: 75 - DNA, 2832 bp, synthetic construct
  misc_feature 1..2832: note = Variant of the Homo Sapiens Lysosomal alpha-glucosidase
  source 1..2832: mol_type = other DNA
atggaatggagctgggtctttctcttcttcctgtcagtaacgactggtgtccactccggacacattctgtggcatgatttttctaccgtgcctagagagctttccggttcaagtcaagtcctcgaagaaacacatccagcccatcaggttggcgcatctaggccgggccctcgggacgctcaactccacccagggagacctagggccgttcccactcagtgcgacgtgccagagaactcacgcttcgattgtgcacctgagaaggctatcacgcaagagcagtgcgaggcccgcggatgttgttacataccggctaaacaggggctgcagggtgcgcagatgggccaaccttggtgcttcttcccaccatcctatccgagttacaagctggagaatctctcccagtctgaaatgggatataccgcaacactgactcggaccaccccctccttctttcccaaagatatcttgactctgagacttgacgtaatgatggagacagaaaacaggctccactttaccattaaggaccctgccaatcgccgatacgaggtgcctctggaaacaccacacgtgcacagtagagctccatcacctctgtattctgtcgagttctccgaagagccgtttggcgttatcgtcaggaggcagctcgacgggcgagtgcttctgaacacgactgtggccccgttgttctttgcggatcagtttctgcaactgtcaacaagtctcccttctcagtacattaccgggcttgcagagcatctgtccccactcatgctgagtacttcatggaacaaaatcacactgtggaatagagaccttgctcctactccaggagccaacttgtatggttctcaccctttctacttggccctggaagatggcggatcagcgcatggcgtattcctcctgaattccaacgcaatggacgttgttcttcagccatctcctgctttgagttggagatctacaggcgggatactggacgtctacatctttctgggtccagagcctaaatccgtagtgcagcagtatcttgatgtcgtcggatacccgtttatgccaccatattggggcctggggttccacttgtgccgctggggatattcatccaccgccattacacgacaagttgttgagaatatgaccagggcacattttcctctggatgtacagtggaacgacctggactacatggatagtcgccgcgacttcaccttcaataaggatgggttcagagactttcctgctatggtccaagaacttcaccagggaggcaggaggtacatgatgatcgtagatccgggaatttcttcttctggcccagccggttcatacagaccgtatgacgaaggactgcgacgaggcgtctttatcacgaacgagactggtcagcctttgataggcaaggtttggccagggtccaccgctttcccggatttcacaaatcctgaggcactggcctggtgggaagatatggtcgccgagtttcacgaccaggtcccatttgacgggatgtggatcgacatgaacgagccatccaacttcattagaggaagtgtggatggctgtccgaataatgagctggaaaaccctccttacgtaccaggcgttgttggtgggactcttcaagctgcgacgatttgcgcatcctcccatcagttcctgtcaacccactataacttgcacaatctgtacgggacaacagaggctatcgccagtcatagggccctggtaaaagctagaggaacacgccctttcgttatctctcgctcaacttttgcaggccacggtaggtatgccggacattggaccggcgacgtctggagttcttgggaacagctggcttcctccgttccagagatattgcagtttaacctgttgggagtcccacttgtaggtgcagatgtttgtggcttcctggggaacacctcagaagaattgtgcgtaagatggactcaactgggcgccttctacccttttatgcgcaatcacaactcactgacatctttgcctcaagaaccgtactcatttagtgagccagcacagcaggccatgaggaaggctcttgttctgagatatgcacttctgccgcatctgtacacccttttccaccaggctcatgtccatggagagactgttgcacgacctctgttcttggagttcccaaaagactcttccacgtggacagtcgatcaccagatgctgtggggcgaggctctgctgattacacctgtattgcaacctggtaaggccgaagttaccgggtactttccattggggacctggtatgatctgcaaacagtcccggttgaagctcttggaagtcttccacctccacctgctgcaccaagggagcctgcgatccactctgaaggacagtgggtaactttgcctgcaccgctggacaccatcaatgtccatctgcgcgaaggctacatcataccacttcaaggtcctggactgaccactacagagtctagaaaacaaccaatggctcttgctgttgcactgactaaaagcggcgaagcaaggggtgagctgttctgggacgacggagagtcactggaggtactcgaacgaggcgcgtatacgcaggtcatttttgaggctcgcaataatacgatcgttaacgagctggtccacgtcacttcagaaggtgcaggccttcagttgggcaaggtaactgtcctgggagttgctacagcaccgcagcaggtcttgtccaacggacggcccgtaagcaactttacctatagtcctgataccaaagttctggacatctgcgttgctctgctgatgggtgagcagttcctggtatcatggtgc

SEQ ID NO: 76 - protein, 944 aa, synthetic construct
  REGION 1..944: note = Variant of the Homo Sapiens Lysosomal alpha-glucosidase
MEWSWVFLFFLSVTTGVHSGHILWHDFSTVPRELSGSSQVLEETHPAHQVGASRPGPRDAQLHPGRPRAVPTQCDVPENSRFDCAPEKAITQEQCEARGCCYIPAKQGLQGAQMGQPWCFFPPSYPSYKLENLSQSEMGYTATLTRTTPSFFPKDILTLRLDVMMETENRLHFTIKDPANRRYEVPLETPHVHSRAPSPLYSVEFSEEPFGVIVRRQLDGRVLLNTTVAPLFFADQFLQLSTSLPSQYITGLAEHLSPLMLSTSWNKITLWNRDLAPTPGANLYGSHPFYLALEDGGSAHGVFLLNSNAMDVVLQPSPALSWRSTGGILDVYIFLGPEPKSVVQQYLDVVGYPFMPPYWGLGFHLCRWGYSSTAITRQVVENMTRAHFPLDVQWNDLDYMDSRRDFTFNKDGFRDFPAMVQELHQGGRRYMMIVDPGISSSGPAGSYRPYDEGLRRGVFITNETGQPLIGKVWPGSTAFPDFTNPEALAWWEDMVAEFHDQVPFDGMWIDMNEPSNFIRGSVDGCPNNELENPPYVPGVVGGTLQAATICASSHQFLSTHYNLHNLYGTTEAIASHRALVKARGTRPFVISRSTFAGHGRYAGHWTGDVWSSWEQLASSVPEILQFNLLGVPLVGADVCGFLGNTSEELCVRWTQLGAFYPFMRNHNSLTSLPQEPYSFSEPAQQAMRKALVLRYALLPHLYTLFHQAHVHGETVARPLFLEFPKDSSTWTVDHQMLWGEALLITPVLQPGKAEVTGYFPLGTWYDLQTVPVEALGSLPPPPAAPREPAIHSEGQWVTLPAPLDTINVHLREGYIIPLQGPGLTTTESRKQPMALAVALTKSGEARGELFWDDGESLEVLERGAYTQVIFEARNNTIVNELVHVTSEGAGLQLGKVTVLGVATAPQQVLSNGRPVSNFTYSPDTKVLDICVALLMGEQFLVSWC

SEQ ID NO: 77 - DNA, 2832 bp, synthetic construct
  misc_feature 1..2832: note = Variant of the Homo Sapiens Lysosomal alpha-glucosidase
  source 1..2832: mol_type = other DNA
atggaatggagctgggtctttctcttcttcctgtcagtaacgactggtgtccactccggacacattctgtggcatgatttttctaccgtgcctagagagctttccggttcaagtcaagtcctcgaagaaacacatccagcccatcaggttggcgcatctaggccgggccctcgggacgctcaactccacccagggagacctagggccgttcccactcagtgcgacgtgccagagaactcacgcttcgattgtgcacctcgtaaggctatcacgcaagagcagtgcgaggcccgcggatgttgttacataccggctaaacaggggctgcagggtgcgcagatgggccaaccttggtgcttcttcccaccatcctatccgagttacaagctggagaatctctcccagtctgaaatgggatataccgcaacactgactcggaccaccccctccttctttcccaaagatatcttgactctgagacttgacgtaatgatggagacagaaaacaggctccactttaccattaaggaccctgccaatcgccgatacgaggtgcctctggaaacaccacacgtgcacagtagagctccatcacctctgtattctgtcgagttctccgaagagccgtttggcgttatcgtcaggaggcagctcgacgggcgagtgcttctgaacacgactgtggccccgttgttctttgcggatcagtttctgcaactgtcaacaagtctcccttctcagtacattaccgggcttgcagagcatctgtccccactcatgctgagtacttcatggaacaaaatcacactgtggaatagagaccttgctcctactccaggagccaacttgtatggttctcaccctttctacttggccctggaagatggcggatcagcgcatggcgtattcctcctgaattccaacgcaatggacgttgttcttcagccatctcctgctttgagttggagatctacaggcgggatactggacgtctacatctttctgggtccagagcctaaatccgtagtgcagcagtatcttgatgtcgtcggatacccgtttatgccaccatattggggcctggggttccacttgtgccgctggggatattcatccaccgccattacacgacaagttgttgagaatatgaccagggcacattttcctctggatgtacagtggaacgacctggactacatggatagtcgccgcgacttcaccttcaataaggatgggttcagagactttcctgctatggtccaagaacttcaccagggaggcaggaggtacatgatgatcgtagatccgggaatttcttcttctggcccagccggttcatacagaccgtatgacgaaggactgcgacgaggcgtctttatcacgaacgagactggtcagcctttgataggcaaggtttggccagggtccaccgctttcccggatttcacaaatcctgaggcactggcctggtgggaagatatggtcgccgagtttcacgaccaggtcccatttgacgggatgtggatcgacatgaacgagccatccaacttcattagaggaagtgtggatggctgtccgaataatgagctggaaaaccctccttacgtaccaggcgttgttggtgggactcttcaagctgcgacgatttgcgcatcctcccatcagttcctgtcaacccactataacttgcacaatctgtacgggacaacagaggctatcgccagtcatagggccctggtaaaagctagaggaacacgccctttcgttatctctcgctcaacttttgcaggccacggtaggtatgccggacattggaccggcgacgtctggagttcttgggaacagctggcttcctccgttccagagatattgcagtttaacctgttgggagtcccacttgtaggtgcagatgtttgtggcttcctggggaacacctcagaagaattgtgcgtaagatggactcaactgggcgccttctacccttttatgcgcaatcacaactcactgacatctttgcctcaagaaccgtactcatttagtgagccagcacagcaggccatgaggaaggctcttggcctgagatatgcacttctgccgcatctgtacacccttttccaccaggctcatgtccatggagagactgttgcacgacctctgttcttggagttcccaaaagactcttccacgtggacagtcgatcaccagatgctgtggggcgaggctctgctgattacacctgtattgcaacctggtaaggccgaagttaccgggtactttccattggggacctggtatgatctgcaaacagtcccggttgaagctcttggaagtcttccacctccacctgctgcaccaagggagcctgcgatccactctgaaggacagtgggtaactttgcctgcaccgctggacaccatcaatgtccatctgcgcgaaggctacatcataccacttcaaggtcctggactgaccactacagagtctagaaaacaaccaatggctcttgctgttgcactgactaaaagcggcgaagcaaggggtgagctgttctgggacgacggagagtcactggaggtactcgaacgaggcgcgtatacgcaggtcatttttgaggctcgcaataatacgatcgttaacgagctggtccacgtcacttcagaaggtgcaggccttcagttgggcaaggtaactgtcctgggagttgctacagcaccgcagcaggtcttgtccaacggacggcccgtaagcaactttacctatagtcctgataccaaagttctggacatctgcgttgctctgctgatgggtgagcagttcctggtatcatggtgc

SEQ ID NO: 78 - protein, 944 aa, synthetic construct
  REGION 1..944: note = Variant of the Homo Sapiens Lysosomal alpha-glucosidase
MEWSWVFLFFLSVTTGVHSGHILWHDFSTVPRELSGSSQVLEETHPAHQVGASRPGPRDAQLHPGRPRAVPTQCDVPENSRFDCAPRKAITQEQCEARGCCYIPAKQGLQGAQMGQPWCFFPPSYPSYKLENLSQSEMGYTATLTRTTPSFFPKDILTLRLDVMMETENRLHFTIKDPANRRYEVPLETPHVHSRAPSPLYSVEFSEEPFGVIVRRQLDGRVLLNTTVAPLFFADQFLQLSTSLPSQYITGLAEHLSPLMLSTSWNKITLWNRDLAPTPGANLYGSHPFYLALEDGGSAHGVFLLNSNAMDVVLQPSPALSWRSTGGILDVYIFLGPEPKSVVQQYLDVVGYPFMPPYWGLGFHLCRWGYSSTAITRQVVENMTRAHFPLDVQWNDLDYMDSRRDFTFNKDGFRDFPAMVQELHQGGRRYMMIVDPGISSSGPAGSYRPYDEGLRRGVFITNETGQPLIGKVWPGSTAFPDFTNPEALAWWEDMVAEFHDQVPFDGMWIDMNEPSNFIRGSVDGCPNNELENPPYVPGVVGGTLQAATICASSHQFLSTHYNLHNLYGTTEAIASHRALVKARGTRPFVISRSTFAGHGRYAGHWTGDVWSSWEQLASSVPEILQFNLLGVPLVGADVCGFLGNTSEELCVRWTQLGAFYPFMRNHNSLTSLPQEPYSFSEPAQQAMRKALGLRYALLPHLYTLFHQAHVHGETVARPLFLEFPKDSSTWTVDHQMLWGEALLITPVLQPGKAEVTGYFPLGTWYDLQTVPVEALGSLPPPPAAPREPAIHSEGQWVTLPAPLDTINVHLREGYIIPLQGPGLTTTESRKQPMALAVALTKSGEARGELFWDDGESLEVLERGAYTQVIFEARNNTIVNELVHVTSEGAGLQLGKVTVLGVATAPQQVLSNGRPVSNFTYSPDTKVLDICVALLMGEQFLVSWC

SEQ ID NO: 79 - DNA, 2832 bp, synthetic construct
  misc_feature 1..2832: note = Variant of the Homo Sapiens Lysosomal alpha-glucosidase
  source 1..2832: mol_type = other DNA
atggaatggagctgggtctttctcttcttcctgtcagtaacgactggtgtccactccggacacattctgtggcatgatttttctaccgtgcctagagagctttccggttcaagtcaagtcctcgaagaaacacatccagcccatcaggttggcgcatctaggccgggccctcgggacgctcaactccacccagggagacctagggccgttcccactcagtgcgacgtgccagagaactcacgcttcgattgtgcacctgagaaggctatcacgcaagagcagtgcgaggcccgcggatgttgttacataccggctaaacaggggctgcagggtgcgcagatgggccaaccttggtgcttcttcccaccatcctatccgagttacaagctggagaatctctcccagtctgaaatgggatataccgcaacactgactcggaccaccccctccttctttcccaaagatatcttgactctgagacttgacgtaatgatggagacagaaaacaggctccactttaccattaaggaccctgccaatcgccgatacgaggtgcctctggaaacaccacacgtgcacagtagagctccatcacctctgtattctgtcgagttctccgaagagccgtttggcgttatcgtcaggaggcagctcgacgggcgagtgcttctgaacacgactgtggccccgttgttctttgcggatcagtttctgcaactgtcaacaagtctcccttctcagtacattaccgggcttgcagagcatctgtccccactcatgctgagtacttcatggaacaaaatcacactgtggaatagagaccttgctcctactccaggagccaacttgtatggttctcaccctttctacttggccctggaagatggcggatcagcgcatggcgtattcctcctgaattccaacgcaatggacgttgttcttcagccatctcctgctttgagttggagatctacaggcgggatactggacgtctacatctttctgggtccagagcctaaatccgtagtgcagcagtatcttgatgtcgtcggatacccgtttatgccaccatattggggcctggggttccacttgtgccgctggggatattcatccaccgccattacacgacaagttgttgagaatatgaccagggcacattttcctctggatgtacagtggaacgacctggactacatggatagtcgccgcgacttcaccttcaataaggatgggttcagagactttcctgctatggtccaagaacttcaccagggaggcaggaggtacatgatgatcgtagatccgggaatttcttcttctggcccagccggttcatacagaccgtatgacgaaggactgcgacgaggcgtctttatcacgaacgagactggtcagcctttgataggcaaggtttggccagggtccaccgctttcccggatttcacaaatcctgaggcactggcctggtgggaagatatggtcgccgagtttcacgaccaggtcccatttgacgggatgtggatcgacatgaacgagccatccaacttcattagaggaagtgtggatggctgtccgaataatgagctggaaaaccctccttacgtaccaggcgttgttggtgggactcttcaagctgcgacgatttgcgcatcctcccatcagttcctgtcaacccactataacttgcacaatctgtacgggacaacagaggctatcgccagtcatagggccctggtaaaagctagaggaacacgccctttcgttatctctcgctcaacttttgcaggccacggtaggtatgccggacattggaccggcgacgtctggagttcttgggaacagctggcttcctccgttccagagatattgcagtttaacctgttgggagtcccacttgtaggtgcagatgtttgtggcttcctggggaacacctcagaagaattgtgcgtaagatggactcaactgggcgccttctacccttttatgcgcaatcacaactcactgacatctttgcctcaagaaccgtactcatttagtgagccagcacagcaggccatgaggaaggctcttggcctgagatatgcacttctgccgcatctgtacacccttttccaccaggctcatgtccatggagagactgttgcacgacctctgttcttggagttcccaaaagactcttccacgtggacagtcgatcaccagatgctgtggggcgaggctctgctgattacacctgtattgcaacctggtaaggccgaagttaccgggtactttccattggggacctggtatgatctgcaaacagtcccggttgaagctcttggaagtcttccacctccacctgctgcaccaagggagcctgcgatccactctgaaggacagtgggtaactttgcctgcaccgctggacaccatcaatgtccatctgcgcgaaggctacatcataccacttcaaggtcctggactgaccactacagagtctagaaaacaaccaatggctcttgctgttgcactgactaaaagcggcgaagcaaggggtgagctgttctgggacgacggagagtcactggaggtactcgaacgaggcgcgtatacgcaggtcatttttgaggctcgcaataatacgatcgttaacgagctggtccacgtcacttcagaaggtgcaggccttcagttgggcaaggtaactgtcctgggagttgctacagcaccgcagcaggtcttgtccaacggacagcccgtaagcaactttacctatagtcctgataccaaagttctggacatctgcgttgctctgctgatgggtgagcagttcctggtatcatggtgc

SEQ ID NO: 80 - protein, 944 aa, synthetic construct
  REGION 1..944: note = Variant of the Homo Sapiens Lysosomal alpha-glucosidase
MEWSWVFLFFLSVTTGVHSGHILWHDFSTVPRELSGSSQVLEETHPAHQVGASRPGPRDAQLHPGRPRAVPTQCDVPENSRFDCAPEKAITQEQCEARGCCYIPAKQGLQGAQMGQPWCFFPPSYPSYKLENLSQSEMGYTATLTRTTPSFFPKDILTLRLDVMMETENRLHFTIKDPANRRYEVPLETPHVHSRAPSPLYSVEFSEEPFGVIVRRQLDGRVLLNTTVAPLFFADQFLQLSTSLPSQYITGLAEHLSPLMLSTSWNKITLWNRDLAPTPGANLYGSHPFYLALEDGGSAHGVFLLNSNAMDVVLQPSPALSWRSTGGILDVYIFLGPEPKSVVQQYLDVVGYPFMPPYWGLGFHLCRWGYSSTAITRQVVENMTRAHFPLDVQWNDLDYMDSRRDFTFNKDGFRDFPAMVQELHQGGRRYMMIVDPGISSSGPAGSYRPYDEGLRRGVFITNETGQPLIGKVWPGSTAFPDFTNPEALAWWEDMVAEFHDQVPFDGMWIDMNEPSNFIRGSVDGCPNNELENPPYVPGVVGGTLQAATICASSHQFLSTHYNLHNLYGTTEAIASHRALVKARGTRPFVISRSTFAGHGRYAGHWTGDVWSSWEQLASSVPEILQFNLLGVPLVGADVCGFLGNTSEELCVRWTQLGAFYPFMRNHNSLTSLPQEPYSFSEPAQQAMRKALGLRYALLPHLYTLFHQAHVHGETVARPLFLEFPKDSSTWTVDHQMLWGEALLITPVLQPGKAEVTGYFPLGTWYDLQTVPVEALGSLPPPPAAPREPAIHSEGQWVTLPAPLDTINVHLREGYIIPLQGPGLTTTESRKQPMALAVALTKSGEARGELFWDDGESLEVLERGAYTQVIFEARNNTIVNELVHVTSEGAGLQLGKVTVLGVATAPQQVLSNGQPVSNFTYSPDTKVLDICVALLMGEQFLVSWC

SEQ ID NO: 81 - DNA, 2832 bp, synthetic construct
  misc_feature 1..2832: note = Variant of the Homo Sapiens Lysosomal alpha-glucosidase
  source 1..2832: mol_type = other DNA
atggaatggagctgggtctttctcttcttcctgtcagtaacgactggtgtccactccggacacattctgtggcatgatttttctaccgtgcctagagagctttccggttcaagtcaagtcctcgaagaaacacatccagcccatcaggttggcgcatctaggccgggccctcgggacgctcaactccacccagggagacctagggccgttcccactcagtgcgacgtgccagagaactcacgcttcgattgtgcacctgagaaggctatcacgcaagagcagtgcgaggcccgcggatgttgttacataccggctaaacaggggctgcagggtgcgcagatgggccaaccttggtgcttcttcccaccatcctatccgagttacaagctggagaatctctcccagtctgaaatgggatataccgcaacactgactcggaccaccccctccttctttcccaaagatatcttgactctgagacttgacgtaatgatggagacagaaaacaggctccactttaccattaaggaccctgccaatcgccgatacgaggtgcctctggaaacaccacacgtgcacagtagagctccatcacctctgtattctgtcgagttctccgaagagccgtttggcgttatcgtcaggaggcagctcgacgggcgagtgcttctgaacacgactgtggccccgttgttctttgcggatcagtttctgcaactgtcaacaagtctcccttctcagtacattaccgggcttgcagagcatctgtccccactcatgctgagtacttcatggaacaaaatcacactgtggaatagagaccttgctcctactccaggagccaacttgtatggttctcaccctttctacttggccctggaagatggcggatcagcgcatggcgtattcctcctgaattccaacgcaatggacgttgttcttcagccatctcctgctttgagttggagatctacaggcgggatactggacgtctacatctttctgggtccagagcctaaatccgtagtgcagcagtatcttgatgtcgtcggatacccgtttatgccaccatattggggcctggggttccacttgtgccgctggggatattcatccaccgccattacacgacaagttgttgagaatatgaccagggcacattttcctctggatgtacagtggaacgacctggactacatggatagtcgccgcgacttcaccttcaataaggatgggttcagagactttcctgctatggtccaagaacttcaccagggaggcaggaggtacatgatgatcgtagatccgggaatttcttcttctggcccagccggttcatacagaccgtatgacgaaggactgcgacgaggcgtctttatcacgaacgagactggtcagcctttgataggcaaggtttggccagggtccaccgctttcccggatttcacaaatcctgaggcactggcctggtgggaagatatggtcgccgagtttcacgaccaggtcccatttgacgggatgtggatcgacatgaacgagccatccaacttcattagaggaagtgtggatggctgtccgaataatgagctggaaaaccctccttacgtaccaggcgttgttggtgggactcttcaagctgcgacgatttgcgcatcctcccatcagttcctgtcaacccactataacttgcacaatctgtacgggacaacagaggctatcgccagtcatagggccctggtaaaagctagaggaacacgccctttcgttatctctcgctcaacttttgcaggccacggtaggtatgccggacattggaccggcgacgtctggagttcttgggaacagctggcttcctccgttccagagatattgcagtttaacctgttgggagtcccacttgtaggtgcagatgtttgtggcttcctggggaacacctcagaagaattgtgcgtaagatggactcaactgggcgccttctacccttttatgcgcaatcacaactcactgacatctttgcctcaagaaccgtactcatttagtgagccagcacagcaggccatgaggaaggctcttggcctgagatatgcacttctgccgcatctgtacacccttttccaccaggctcatgtccttggagagactgttgcacgacctctgttcttggagttcccaaaagactcttccacgtggacagtcgatcaccagatgctgtggggcgaggctctgctgattacacctgtattgcaacctggtaaggccgaagttaccgggtactttccattggggacctggtatgatctgcaaacagtcccggttgaagctcttggaagtcttccacctccacctgctgcaccaagggagcctgcgatccactctgaaggacagtgggtaactttgcctgcaccgctggacaccatcaatgtccatctgcgcgaaggctacatcataccacttcaaggtcctggactgaccactacagagtctagaaaacaaccaatggctcttgctgttgcactgactaaaagcggcgaagcaaggggtgagctgttctgggacgacggagagtcactggaggtactcgaacgaggcgcgtatacgcaggtcatttttgaggctcgcaataatacgatcgttaacgagctggtccacgtcacttcagaaggtgcaggccttcagttgggcaaggtaactgtcctgggagttgctacagcaccgcagcaggtcttgtccaacggacggcccgtaagcaactttacctatagtcctgataccaaagttctggacatctgcgttgctctgctgatgggtgagcagttcctggtatcatggtgc

SEQ ID NO: 82 - protein, 944 aa, synthetic construct
  REGION 1..944: note = Variant of the Homo Sapiens Lysosomal alpha-glucosidase
MEWSWVFLFFLSVTTGVHSGHILWHDFSTVPRELSGSSQVLEETHPAHQVGASRPGPRDAQLHPGRPRAVPTQCDVPENSRFDCAPEKAITQEQCEARGCCYIPAKQGLQGAQMGQPWCFFPPSYPSYKLENLSQSEMGYTATLTRTTPSFFPKDILTLRLDVMMETENRLHFTIKDPANRRYEVPLETPHVHSRAPSPLYSVEFSEEPFGVIVRRQLDGRVLLNTTVAPLFFADQFLQLSTSLPSQYITGLAEHLSPLMLSTSWNKITLWNRDLAPTPGANLYGSHPFYLALEDGGSAHGVFLLNSNAMDVVLQPSPALSWRSTGGILDVYIFLGPEPKSVVQQYLDVVGYPFMPPYWGLGFHLCRWGYSSTAITRQVVENMTRAHFPLDVQWNDLDYMDSRRDFTFNKDGFRDFPAMVQELHQGGRRYMMIVDPGISSSGPAGSYRPYDEGLRRGVFITNETGQPLIGKVWPGSTAFPDFTNPEALAWWEDMVAEFHDQVPFDGMWIDMNEPSNFIRGSVDGCPNNELENPPYVPGVVGGTLQAATICASSHQFLSTHYNLHNLYGTTEAIASHRALVKARGTRPFVISRSTFAGHGRYAGHWTGDVWSSWEQLASSVPEILQFNLLGVPLVGADVCGFLGNTSEELCVRWTQLGAFYPFMRNHNSLTSLPQEPYSFSEPAQQAMRKALGLRYALLPHLYTLFHQAHVLGETVARPLFLEFPKDSSTWTVDHQMLWGEALLITPVLQPGKAEVTGYFPLGTWYDLQTVPVEALGSLPPPPAAPREPAIHSEGQWVTLPAPLDTINVHLREGYIIPLQGPGLTTTESRKQPMALAVALTKSGEARGELFWDDGESLEVLERGAYTQVIFEARNNTIVNELVHVTSEGAGLQLGKVTVLGVATAPQQVLSNGRPVSNFTYSPDTKVLDICVALLMGEQFLVSWC

SEQ ID NO: 83 - DNA, 2832 bp, synthetic construct
  misc_feature 1..2832: note = Variant of the Homo Sapiens Lysosomal alpha-glucosidase
  source 1..2832: mol_type = other DNA
atggaatggagctgggtctttctcttcttcctgtcagtaacgactggtgtccactccggacacattctgtggcatgatttttctaccgtgcctagagagctttccggttcaagtcaagtcctcgaagaaacacatccagcccatcaggttggcgcatctaggccgggccctcgggacgctcaactccacccagggagacctagggccgttcccactcagtgcgacgtgccagagaactcacgcttcgattgtgcacctctgaaggctatcacgcaagagcagtgcgaggcccgcggatgttgttacataccggctaaacaggggctgcagggtgcgcagatgggccaaccttggtgcttcttcccaccatcctatccgagttacaagctggagaatctctcccagtctgaaatgggatataccgcaacactgactcggaccaccccctccttctttcccaaagatatcttgactctgagacttgacgtaatgatggagacagaaaacaggctccactttaccattaaggaccctgccaatcgccgatacgaggtgcctctggaaacaccacacgtgcacagtagagctccatcacctctgtattctgtcgagttctccgaagagccgtttggcgttatcgtcaggaggcagctcgacgggcgagtgcttctgaacacgactgtggccccgttgttctttgcggatcagtttctgcaactgtcaacaagtctcccttctcagtacattaccgggcttgcagagcatctgtccccactcatgctgagtacttcatggaacaaaatcacactgtggaatagagaccttgctcctactccaggagccaacttgtatggttctcaccctttctacttggccctggaagatggcggatcagcgcatggcgtattcctcctgaattccaacgcaatggacgttgttcttcagccatctcctgctttgagttggagatctacaggcgggatactggacgtctacatctttctgggtccagagcctaaatccgtagtgcagcagtatcttgatgtcgtcggatacccgtttatgccaccatattggggcctggggttccacttgtgccgctggggatattcatccaccgccattacacgacaagttgttgagaatatgaccagggcacattttcctctggatgtacagtggaacgacctggactacatggatagtcgccgcgacttcaccttcaataaggatgggttcagagactttcctgctatggtccaagaacttcaccagggaggcaggaggtacatgatgatcgtagatccgggaatttcttcttctggcccagccggttcatacagaccgtatgacgaaggactgcgacgaggcgtctttatcacgaacgagactggtcagcctttgataggcaaggtttggccagggtccaccgctttcccggatttcacaaatcctgaggcactggcctggtgggaagatatggtcgccgagtttcacgaccaggtcccatttgacgggatgtggatcgacatgaacgagccatccaacttcattagaggaagtgtggatggctgtccgaataatgagctggaaaaccctccttacgtaccaggcgttgttggtgggactcttcaagctgcgacgatttgcgcatcctcccatcagttcctgtcaacccactataacttgcacaatctgtacgggacaacagaggctatcgccagtcatagggccctggtaaaagctagaggaacacgccctttcgttatctctcgctcaacttttgcaggccacggtaggtatgccggacattggaccggcgacgtctggagttcttgggaacagctggcttcctccgttccagagatattgcagtttaacctgttgggagtcccacttgtaggtgcagatgtttgtggcttcctggggaacacctcagaagaattgtgcgtaagatggactcaactgggcgccttctacccttttatgcgcaatcacaactcactgacatctttgcctcaagaaccgtactcatttagtgagccagcacagcaggccatgaggaaggctcttggcctgagatatgcacttctgccgcatctgtacacccttttccaccaggctcatgtccatggagagactgttgcacgacctctgttcttggagttcccaaaagactcttccacgtggacagtcgatcaccagatgctgtggggcgaggctctgctgattacacctgtattgcaacctggtaaggccgaagttaccgggtactttccattggggacctggtatgatctgcaaacagtcccggttgaagctcttggaagtcttccacctccacctgctgcaccaagggagcctgcgatccactctgaaggacagtgggtaactttgcctgcaccgctggacaccatcaatgtccatctgcgcgaaggctacatcataccacttcaaggtcctggactgaccactacagagtctagaaaacaaccaatggctcttgctgttgcactgactaaaagcggcgaagcaaggggtgagctgttctgggacgacggagagtcactggaggtactcgaacgaggcgcgtatacgcaggtcatttttgaggctcgcaataatacgatcgttaacgagctggtccacgtcacttcagaaggtgcaggccttcagttgggcaaggtaactgtcctgggagttgctacagcaccgcagcaggtcttgtccaacggacggcccgtaagcaactttacctatagtcctgataccaaagttctggacatctgcgttgctctgctgatgggtgagcagttcctggtatcatggtgc

SEQ ID NO: 84 - protein, 944 aa, synthetic construct
  REGION 1..944: note = Variant of the Homo Sapiens Lysosomal alpha-glucosidase
MEWSWVFLFFLSVTTGVHSGHILWHDFSTVPRELSGSSQVLEETHPAHQVGASRPGPRDAQLHPGRPRAVPTQCDVPENSRFDCAPLKAITQEQCEARGCCYIPAKQGLQGAQMGQPWCFFPPSYPSYKLENLSQSEMGYTATLTRTTPSFFPKDILTLRLDVMMETENRLHFTIKDPANRRYEVPLETPHVHSRAPSPLYSVEFSEEPFGVIVRRQLDGRVLLNTTVAPLFFADQFLQLSTSLPSQYITGLAEHLSPLMLSTSWNKITLWNRDLAPTPGANLYGSHPFYLALEDGGSAHGVFLLNSNAMDVVLQPSPALSWRSTGGILDVYIFLGPEPKSVVQQYLDVVGYPFMPPYWGLGFHLCRWGYSSTAITRQVVENMTRAHFPLDVQWNDLDYMDSRRDFTFNKDGFRDFPAMVQELHQGGRRYMMIVDPGISSSGPAGSYRPYDEGLRRGVFITNETGQPLIGKVWPGSTAFPDFTNPEALAWWEDMVAEFHDQVPFDGMWIDMNEPSNFIRGSVDGCPNNELENPPYVPGVVGGTLQAATICASSHQFLSTHYNLHNLYGTTEAIASHRALVKARGTRPFVISRSTFAGHGRYAGHWTGDVWSSWEQLASSVPEILQFNLLGVPLVGADVCGFLGNTSEELCVRWTQLGAFYPFMRNHNSLTSLPQEPYSFSEPAQQAMRKALGLRYALLPHLYTLFHQAHVHGETVARPLFLEFPKDSSTWTVDHQMLWGEALLITPVLQPGKAEVTGYFPLGTWYDLQTVPVEALGSLPPPPAAPREPAIHSEGQWVTLPAPLDTINVHLREGYIIPLQGPGLTTTESRKQPMALAVALTKSGEARGELFWDDGESLEVLERGAYTQVIFEARNNTIVNELVHVTSEGAGLQLGKVTVLGVATAPQQVLSNGRPVSNFTYSPDTKVLDICVALLMGEQFLVSWC

SEQ ID NO: 85 - DNA, 2832 bp, synthetic construct
  misc_feature 1..2832: note = Variant of the Homo Sapiens Lysosomal alpha-glucosidase
  source 1..2832: mol_type = other DNA
atggaatggagctgggtctttctcttcttcctgtcagtaacgactggtgtccactccggacacattctgtggcatgatttttctaccgtgcctagagagctttccggttcaagtcaagtcctcgaagaaacacatccagcccatcaggttggcgcatctaggccgggccctcgggacgctcaactccacccagggagacctagggccgttcccactcagtgcgacgtgccagagaactcacgcttcgattgtgcacctgttaaggctatcacgcaagagcagtgcgaggcccgcggatgttgttacataccggctaaacaggggctgcagggtgcgcagatgggccaaccttggtgcttcttcccaccatcctatccgagttacaagctggagaatctctcccagtctgaaatgggatataccgcaacactgactcggaccaccccctccttctttcccaaagatatcttgactctgagacttgacgtaatgatggagacagaaaacaggctccactttaccattaaggaccctgccaatcgccgatacgaggtgcctctggaaacaccacacgtgcacagtagagctccatcacctctgtattctgtcgagttctccgaagagccgtttggcgttatcgtcaggaggcagctcgacgggcgagtgcttctgaacacgactgtggccccgttgttctttgcggatcagtttctgcaactgtcaacaagtctcccttctcagtacattaccgggcttgcagagcatctgtccccactcatgctgagtacttcatggaacaaaatcacactgtggaatagagaccttgctcctactccaggagccaacttgtatggttctcaccctttctacttggccctggaagatggcggatcagcgcatggcgtattcctcctgaattccaacgcaatggacgttgttcttcagccatctcctgctttgagttggagatctacaggcgggatactggacgtctacatctttctgggtccagagcctaaatccgtagtgcagcagtatcttgatgtcgtcggatacccgtttatgccaccatattggggcctggggttccacttgtgccgctggggatattcatccaccgccattacacgacaagttgttgagaatatgaccagggcacattttcctctggatgtacagtggaacgacctggactacatggatagtcgccgcgacttcaccttcaataaggatgggttcagagactttcctgctatggtccaagaacttcaccagggaggcaggaggtacatgatgatcgtagatccgggaatttcttcttctggcccagccggttcatacagaccgtatgacgaaggactgcgacgaggcgtctttatcacgaacgagactggtcagcctttgataggcaaggtttggccagggtccaccgctttcccggatttcacaaatcctgaggcactggcctggtgggaagatatggtcgccgagtttcacgaccaggtcccatttgacgggatgtggatcgacatgaacgagccatccaacttcattagaggaagtgtggatggctgtccgaataatgagctggaaaaccctccttacgtaccaggcgttgttggtgggactcttcaagctgcgacgatttgcgcatcctcccatcagttcctgtcaacccactataacttgcacaatctgtacgggacaacagaggctatcgccagtcatagggccctggtaaaagctagaggaacacgccctttcgttatctctcgctcaacttttgcaggccacggtaggtatgccggacattggaccggcgacgtctggagttcttgggaacagctggcttcctccgttccagagatattgcagtttaacctgttgggagtcccacttgtaggtgcagatgtttgtggcttcctggggaacacctcagaagaattgtgcgtaagatggactcaactgggcgccttctacccttttatgcgcaatcacaactcactgacatctttgcctcaagaaccgtactcatttagtgagccagcacagcaggccatgaggaaggctcttggcctgagatatgcacttctgccgcatctgtacacccttttccaccaggctcatgtccatggagagactgttgcacgacctctgttcttggagttcccaaaagactcttccacgtggacagtcgatcaccagatgctgtggggcgaggctctgctgattacacctgtattgcaacctggtaaggccgaagttaccgggtactttccattggggacctggtatgatctgcaaacagtcccggttgaagctcttggaagtcttccacctccacctgctgcaccaagggagcctgcgatccactctgaaggacagtgggtaactttgcctgcaccgctggacaccatcaatgtccatctgcgcgaaggctacatcataccacttcaaggtcctggactgaccactacagagtctagaaaacaaccaatggctcttgctgttgcactgactaaaagcggcgaagcaaggggtgagctgttctgggacgacggagagtcactggaggtactcgaacgaggcgcgtatacgcaggtcatttttgaggctcgcaataatacgatcgttaacgagctggtccacgtcacttcagaaggtgcaggccttcagttgggcaaggtaactgtcctgggagttgctacagcaccgcagcaggtcttgtccaacggacggcccgtaagcaactttacctatagtcctgataccaaagttctggacatctgcgttgctctgctgatgggtgagcagttcctggtatcatggtgc

SEQ ID NO: 86 - protein, 944 aa, synthetic construct
  REGION 1..944: note = Variant of the Homo Sapiens Lysosomal alpha-glucosidase
MEWSWVFLFFLSVTTGVHSGHILWHDFSTVPRELSGSSQVLEETHPAHQVGASRPGPRDAQLHPGRPRAVPTQCDVPENSRFDCAPVKAITQEQCEARGCCYIPAKQGLQGAQMGQPWCFFPPSYPSYKLENLSQSEMGYTATLTRTTPSFFPKDILTLRLDVMMETENRLHFTIKDPANRRYEVPLETPHVHSRAPSPLYSVEFSEEPFGVIVRRQLDGRVLLNTTVAPLFFADQFLQLSTSLPSQYITGLAEHLSPLMLSTSWNKITLWNRDLAPTPGANLYGSHPFYLALEDGGSAHGVFLLNSNAMDVVLQPSPALSWRSTGGILDVYIFLGPEPKSVVQQYLDVVGYPFMPPYWGLGFHLCRWGYSSTAITRQVVENMTRAHFPLDVQWNDLDYMDSRRDFTFNKDGFRDFPAMVQELHQGGRRYMMIVDPGISSSGPAGSYRPYDEGLRRGVFITNETGQPLIGKVWPGSTAFPDFTNPEALAWWEDMVAEFHDQVPFDGMWIDMNEPSNFIRGSVDGCPNNELENPPYVPGVVGGTLQAATICASSHQFLSTHYNLHNLYGTTEAIASHRALVKARGTRPFVISRSTFAGHGRYAGHWTGDVWSSWEQLASSVPEILQFNLLGVPLVGADVCGFLGNTSEELCVRWTQLGAFYPFMRNHNSLTSLPQEPYSFSEPAQQAMRKALGLRYALLPHLYTLFHQAHVHGETVARPLFLEFPKDSSTWTVDHQMLWGEALLITPVLQPGKAEVTGYFPLGTWYDLQTVPVEALGSLPPPPAAPREPAIHSEGQWVTLPAPLDTINVHLREGYIIPLQGPGLTTTESRKQPMALAVALTKSGEARGELFWDDGESLEVLERGAYTQVIFEARNNTIVNELVHVTSEGAGLQLGKVTVLGVATAPQQVLSNGRPVSNFTYSPDTKVLDICVALLMGEQFLVSWC

SEQ ID NO: 87 - DNA, 2832 bp, synthetic construct
  misc_feature 1..2832: note = Variant of the Homo Sapiens Lysosomal alpha-glucosidase
  source 1..2832: mol_type = other DNA
atggaatggagctgggtctttctcttcttcctgtcagtaacgactggtgtccactccggacacattctgtggcatgatttttctaccgtgcctagagagctttccggttcaagtcaagtcctcgaagaaacacatccagcccatcaggttggcgcatctaggccgggccctcgggacgctcaactccacccagggagacctagggccgttcccactcagtgcgacgtgccatataactcacgcttcgattgtgcacctgagaaggctatcacgcaagagcagtgcgaggcccgcggatgttgttacataccggctaaacaggggctgcagggtgcgcagatgggccaaccttggtgcttcttcccaccatcctatccgagttacaagctggagaatctctcccagtctgaaatgggatataccgcaacactgactcggaccaccccctccttctttcccaaagatatcttgactctgagacttgacgtaatgatggagacagaaaacaggctccactttaccattaaggaccctgccaatcgccgatacgaggtgcctctggaaacaccacacgtgcacagtagagctccatcacctctgtattctgtcgagttctccgaagagccgtttggcgttatcgtcaggaggcagctcgacgggcgagtgcttctgaacacgactgtggccccgttgttctttgcggatcagtttctgcaactgtcaacaagtctcccttctcagtacattaccgggcttgcagagcatctgtccccactcatgctgagtacttcatggaacaaaatcacactgtggaatagagaccttgctcctactccaggagccaacttgtatggttctcaccctttctacttggccctggaagatggcggatcagcgcatggcgtattcctcctgaattccaacgcaatggacgttgttcttcagccatctcctgctttgagttggagatctacaggcgggatactggacgtctacatctttctgggtccagagcctaaatccgtagtgcagcagtatcttgatgtcgtcggatacccgtttatgccaccatattggggcctggggttccacttgtgccgctggggatattcatccaccgccattacacgacaagttgttgagaatatgaccagggcacattttcctctggatgtacagtggaacgacctggactacatggatagtcgccgcgacttcaccttcaataaggatgggttcagagactttcctgctatggtccaagaacttcaccagggaggcaggaggtacatgatgatcgtagatccgggaatttcttcttctggcccagccggttcatacagaccgtatgacgaaggactgcgacgaggcgtctttatcacgaacgagactggtcagcctttgataggcaaggtttggccagggtccaccgctttcccggatttcacaaatcctgaggcactggcctggtgggaagatatggtcgccgagtttcacgaccaggtcccatttgacgggatgtggatcgacatgaacgagccatccaacttcattagaggaagtgtggatggctgtccgaataatgagctggaaaaccctccttacgtaccaggcgttgttggtgggactcttcaagctgcgacgatttgcgcatcctcccatcagttcctgtcaacccactataacttgcacaatctgtacgggacaacagaggctatcgccagtcatagggccctggtaaaagctagaggaacacgccctttcgttatctctcgctcaacttttgcaggccacggtaggtatgccggacattggaccggcgacgtctggagttcttgggaacagctggcttcctccgttccagagatattgcagtttaacctgttgggagtcccacttgtaggtgcagatgtttgtggcttcctggggaacacctcagaagaattgtgcgtaagatggactcaactgggcgccttctacccttttatgcgcaatcacaactcactgacatctttgcctcaagaaccgtactcatttagtgagccagcacagcaggccatgaggaaggctcttggcctgagatatgcacttctgccgcatctgtacacccttttccaccaggctcatgtccatggagagactgttgcacgacctctgttcttggagttcccaaaagactcttccacgtggacagtcgatcaccagatgctgtggggcgaggctctgctgattacacctgtattgcaacctggtaaggccgaagttaccgggtactttccattggggacctggtatgatctgcaaacagtcccggttgaagctcttggaagtcttccacctccacctgctgcaccaagggagcctgcgatccactctgaaggacagtgggtaactttgcctgcaccgctggacaccatcaatgtccatctgcgcgaaggctacatcataccacttcaaggtcctggactgaccactacagagtctagaaaacaaccaatggctcttgctgttgcactgactaaaagcggcgaagcaaggggtgagctgttctgggacgacggagagtcactggaggtactcgaacgaggcgcgtatacgcaggtcatttttgaggctcgcaataatacgatcgttaacgagctggtccacgtcacttcagaaggtgcaggccttcagttgggcaaggtaactgtcctgggagttgctacagcaccgcagcaggtcttgtccaacggacggcccgtaagcaactttacctatagtcctgataccaaagttctggacatctgcgttgctctgctgatgggtgagcagttcctggtatcatggtgc

SEQ ID NO: 88 - protein, 944 aa, synthetic construct
  REGION 1..944: note = Variant of the Homo Sapiens Lysosomal alpha-glucosidase
MEWSWVFLFFLSVTTGVHSGHILWHDFSTVPRELSGSSQVLEETHPAHQVGASRPGPRDAQLHPGRPRAVPTQCDVPYNSRFDCAPEKAITQEQCEARGCCYIPAKQGLQGAQMGQPWCFFPPSYPSYKLENLSQSEMGYTATLTRTTPSFFPKDILTLRLDVMMETENRLHFTIKDPANRRYEVPLETPHVHSRAPSPLYSVEFSEEPFGVIVRRQLDGRVLLNTTVAPLFFADQFLQLSTSLPSQYITGLAEHLSPLMLSTSWNKITLWNRDLAPTPGANLYGSHPFYLALEDGGSAHGVFLLNSNAMDVVLQPSPALSWRSTGGILDVYIFLGPEPKSVVQQYLDVVGYPFMPPYWGLGFHLCRWGYSSTAITRQVVENMTRAHFPLDVQWNDLDYMDSRRDFTFNKDGFRDFPAMVQELHQGGRRYMMIVDPGISSSGPAGSYRPYDEGLRRGVFITNETGQPLIGKVWPGSTAFPDFTNPEALAWWEDMVAEFHDQVPFDGMWIDMNEPSNFIRGSVDGCPNNELENPPYVPGVVGGTLQAATICASSHQFLSTHYNLHNLYGTTEAIASHRALVKARGTRPFVISRSTFAGHGRYAGHWTGDVWSSWEQLASSVPEILQFNLLGVPLVGADVCGFLGNTSEELCVRWTQLGAFYPFMRNHNSLTSLPQEPYSFSEPAQQAMRKALGLRYALLPHLYTLFHQAHVHGETVARPLFLEFPKDSSTWTVDHQMLWGEALLITPVLQPGKAEVTGYFPLGTWYDLQTVPVEALGSLPPPPAAPREPAIHSEGQWVTLPAPLDTINVHLREGYIIPLQGPGLTTTESRKQPMALAVALTKSGEARGELFWDDGESLEVLERGAYTQVIFEARNNTIVNELVHVTSEGAGLQLGKVTVLGVATAPQQVLSNGRPVSNFTYSPDTKVLDICVALLMGEQFLVSWC

SEQ ID NO: 89 - DNA, 2832 bp, synthetic construct
  misc_feature 1..2832: note = Variant of the Homo Sapiens Lysosomal alpha-glucosidase
  source 1..2832: mol_type = other DNA
atggaatggagctgggtctttctcttcttcctgtcagtaacgactggtgtccactccggacacattctgtggcatgatttttctaccgtgcctagagagctttccggttcaagtcaagtcctcgaagaaacacatccagcccatcaggttggcgcatctaggccgggccctcgggacgctcaactccacccagggagacctagggccgttcccactcagtgcgacgtgccagagaactcacgcttcgattgtgcacctgagaaggctatcacgcaagagcagtgcgaggcccgcggatgttgttacataccggctaaacaggggctgcagggtgcgcagatgggccaaccttggtgcttcttcccaccatcctatccgagttacaagctggagaatctctcccagtctgaaatgggatataccgcaacactgactcggaccaccccctccttctttcccaaagatatcttgactctgagacttgacgtaatgatggagacagaaaacaggctccactttaccattaaggaccctgccaatcgccgatacgaggtgcctctggaaacaccacacgtgcacagtagagctccatcacctctgtattctgtcgagttctccgaagagccgtttggcgttatcgtcaggaggcagctcgacgggcgagtgcttctgaacacgactgtggccccgttgttctttgcggatcagtttctgcaactgtcaacaagtctcccttctcagtacattaccgggcttgcagagcatctgtccccactcatgctgagtacttcatggaacaaaatcacactgtggaatagagaccttgctcctactccaggagccaacttgtatggttctcaccctttctacttggccctggaagatggcggatcagcgcatggcgtattcctcctgaattccaacgcaatggacgttgttcttcagccatctcctgctttgagttggagatctacaggcgggatactggacgtctacatctttctgggtccagagcctaaatccgtagtgcagcagtatcttgatgtcgtcggatacccgtttatgccaccatattggggcctggggttccacttgtgccgctggggatattcatccaccgccattacacgacaagttgttgagaatatgaccagggcacattttcctctggatgtacagtggaacgacctggactacatggatagtcgccgcgacttcaccttcaataaggatgggttcagagactttcctgctatggtccaagaacttcaccagggaggcaggaggtacatgatgatcgtagatccgggaatttcttcttctggcccagccggttcatacagaccgtatgacgaaggactgcgacgaggcgtctttatcacgaacgagactggtcagcctttgataggcaaggtttggccagggtccaccgctttcccggatttcacaaatcctgaggcactggcctggtgggaagatatggtcgccgagtttcacgaccaggtcccatttgacgggatgtggatcgacatgaacgagccatccaacttcattagaggaagtgtggatggctgtccgaataatgagctggaaaaccctccttacgtaccaggcgttgttggtgggactcttcaagctgcgacgatttgcgcatcctcccatcagttcctgtcaacccactataacttgcacaatctgtacgggtgtacagaggctatcgccagtcatagggccctggtaaaagctagaggaacacgccctttcgttatctctcgctcaacttttgcaggccacggtaggtatgccggacattggaccggcgacgtctggagttcttgggaacagctggcttcctccgttccagagatattgcagtttaacctgttgggagtcccacttgtaggtgcagatgtttgtggcttcctggggaacacctcagaagaattgtgcgtaagatggactcaactgggcgccttctacccttttatgcgcaatcacaactcactgacatctttgcctcaagaaccgtactcatttagtgagccagcacagcaggccatgaggaaggctcttggcctgagatatgcacttctgccgcatctgtacacccttttccaccaggctcatgtccatggagagactgttgcacgacctctgttcttggagttcccaaaagactcttccacgtggacagtcgatcaccagatgctgtggggcgaggctctgctgattacacctgtattgcaacctggtaaggccgaagttaccgggtactttccattggggacctggtatgatctgcaaacagtcccggttgaagctcttggaagtcttccacctccacctgctgcaccaagggagcctgcgatccactctgaaggacagtgggtaactttgcctgcaccgctggacaccatcaatgtccatctgcgcgaaggctacatcataccacttcaaggtcctggactgaccactacagagtctagaaaacaaccaatggctcttgctgttgcactgactaaaagcggcgaagcaaggggtgagctgttctgggacgacggagagtcactggaggtactcgaacgaggcgcgtatacgcaggtcatttttgaggctcgcaataatacgatcgttaacgagctggtccacgtcacttcagaaggtgcaggccttcagttgggcaaggtaactgtcctgggagttgctacagcaccgcagcaggtcttgtccaacggacggcccgtaagcaactttacctatagtcctgataccaaagttctggacatctgcgttgctctgctgatgggtgagcagttcctggtatcatggtgc

SEQ ID NO: 90 - protein, 944 aa, synthetic construct
  REGION 1..944: note = Variant of the Homo Sapiens Lysosomal alpha-glucosidase
MEWSWVFLFFLSVTTGVHSGHILWHDFSTVPRELSGSSQVLEETHPAHQVGASRPGPRDAQLHPGRPRAVPTQCDVPENSRFDCAPEKAITQEQCEARGCCYIPAKQGLQGAQMGQPWCFFPPSYPSYKLENLSQSEMGYTATLTRTTPSFFPKDILTLRLDVMMETENRLHFTIKDPANRRYEVPLETPHVHSRAPSPLYSVEFSEEPFGVIVRRQLDGRVLLNTTVAPLFFADQFLQLSTSLPSQYITGLAEHLSPLMLSTSWNKITLWNRDLAPTPGANLYGSHPFYLALEDGGSAHGVFLLNSNAMDVVLQPSPALSWRSTGGILDVYIFLGPEPKSVVQQYLDVVGYPFMPPYWGLGFHLCRWGYSSTAITRQVVENMTRAHFPLDVQWNDLDYMDSRRDFTFNKDGFRDFPAMVQELHQGGRRYMMIVDPGISSSGPAGSYRPYDEGLRRGVFITNETGQPLIGKVWPGSTAFPDFTNPEALAWWEDMVAEFHDQVPFDGMWIDMNEPSNFIRGSVDGCPNNELENPPYVPGVVGGTLQAATICASSHQFLSTHYNLHNLYGCTEAIASHRALVKARGTRPFVISRSTFAGHGRYAGHWTGDVWSSWEQLASSVPEILQFNLLGVPLVGADVCGFLGNTSEELCVRWTQLGAFYPFMRNHNSLTSLPQEPYSFSEPAQQAMRKALGLRYALLPHLYTLFHQAHVHGETVARPLFLEFPKDSSTWTVDHQMLWGEALLITPVLQPGKAEVTGYFPLGTWYDLQTVPVEALGSLPPPPAAPREPAIHSEGQWVTLPAPLDTINVHLREGYIIPLQGPGLTTTESRKQPMALAVALTKSGEARGELFWDDGESLEVLERGAYTQVIFEARNNTIVNELVHVTSEGAGLQLGKVTVLGVATAPQQVLSNGRPVSNFTYSPDTKVLDICVALLMGEQFLVSWC

SEQ ID NO: 91 - DNA, 2832 bp, synthetic construct
  misc_feature 1..2832: note = Variant of the Homo Sapiens Lysosomal alpha-glucosidase
  source 1..2832: mol_type = other DNA
atggaatggagctgggtctttctcttcttcctgtcagtaacgactggtgtccactccggacacattctgtggcatgatttttctaccgtgcctagagagctttccggttcaagtcaagtcctcgaagaaacacatccagcccatcaggttggcgcatctaggccgggccctcgggacgctcaactccacccagggagacctagggccgttcccactcagtgcgacgtgccagagaactcacgcttcgattgtgcaccttggaaggctatcacgcaagagcagtgcgaggcccgcggatgttgttacataccggctaaacaggggctgcagggtgcgcagatgggccaaccttggtgcttcttcccaccatcctatccgagttacaagctggagaatctctcccagtctgaaatgggatataccgcaacactgactcggaccaccccctccttctttcccaaagatatcttgactctgagacttgacgtaatgatggagacagaaaacaggctccactttaccattaaggaccctgccaatcgccgatacgaggtgcctctggaaacaccacacgtgcacagtagagctccatcacctctgtattctgtcgagttctccgaagagccgtttggcgttatcgtcaggaggcagctcgacgggcgagtgcttctgaacacgactgtggccccgttgttctttgcggatcagtttctgcaactgtcaacaagtctcccttctcagtacattaccgggcttgcagagcatctgtccccactcatgctgagtacttcatggaacaaaatcacactgtggaatagagaccttgctcctactccaggagccaacttgtatggttctcaccctttctacttggccctggaagatggcggatcagcgcatggcgtattcctcctgaattccaacgcaatggacgttgttcttcagccatctcctgctttgagttggagatctacaggcgggatactggacgtctacatctttctgggtccagagcctaaatccgtagtgcagcagtatcttgatgtcgtcggatacccgtttatgccaccatattggggcctggggttccacttgtgccgctggggatattcatccaccgccattacacgacaagttgttgagaatatgaccagggcacattttcctctggatgtacagtggaacgacctggactacatggatagtcgccgcgacttcaccttcaataaggatgggttcagagactttcctgctatggtccaagaacttcaccagggaggcaggaggtacatgatgatcgtagatccgggaatttcttcttctggcccagccggttcatacagaccgtatgacgaaggactgcgacgaggcgtctttatcacgaacgagactggtcagcctttgataggcaaggtttggccagggtccaccgctttcccggatttcacaaatcctgaggcactggcctggtgggaagatatggtcgccgagtttcacgaccaggtcccatttgacgggatgtggatcgacatgaacgagccatccaacttcattagaggaagtgtggatggctgtccgaataatgagctggaaaaccctccttacgtaccaggcgttgttggtgggactcttcaagctgcgacgatttgcgcatcctcccatcagttcctgtcaacccactataacttgcacaatctgtacgggacaacagaggctatcgccagtcatagggccctggtaaaagctagaggaacacgccctttcgttatctctcgctcaacttttgcaggccacggtaggtatgccggacattggaccggcgacgtctggagttcttgggaacagctggcttcctccgttccagagatattgcagtttaacctgttgggagtcccacttgtaggtgcagatgtttgtggcttcctggggaacacctcagaagaattgtgcgtaagatggactcaactgggcgccttctacccttttatgcgcaatcacaactcactgacatctttgcctcaagaaccgtactcatttagtgagccagcacagcaggccatgaggaaggctcttggcctgagatatgcacttctgccgcatctgtacacccttttccaccaggctcatgtccatggagagactgttgcacgacctctgttcttggagttcccaaaagactcttccacgtggacagtcgatcaccagatgctgtggggcgaggctctgctgattacacctgtattgcaacctggtaaggccgaagttaccgggtactttccattggggacctggtatgatctgcaaacagtcccggttgaagctcttggaagtcttccacctccacctgctgcaccaagggagcctgcgatccactctgaaggacagtgggtaactttgcctgcaccgctggacaccatcaatgtccatctgcgcgaaggctacatcataccacttcaaggtcctggactgaccactacagagtctagaaaacaaccaatggctcttgctgttgcactgactaaaagcggcgaagcaaggggtgagctgttctgggacgacggagagtcactggaggtactcgaacgaggcgcgtatacgcaggtcatttttgaggctcgcaataatacgatcgttaacgagctggtccacgtcacttcagaaggtgcaggccttcagttgggcaaggtaactgtcctgggagttgctacagcaccgcagcaggtcttgtccaacggacggcccgtaagcaactttacctatagtcctgataccaaagttctggacatctgcgttgctctgctgatgggtgagcagttcctggtatcatggtgc

SEQ ID NO: 92 - protein, 944 aa, synthetic construct
  REGION 1..944: note = Variant of the Homo Sapiens Lysosomal alpha-glucosidase
MEWSWVFLFFLSVTTGVHSGHILWHDFSTVPRELSGSSQVLEETHPAHQVGASRPGPRDAQLHPGRPRAVPTQCDVPENSRFDCAPWKAITQEQCEARGCCYIPAKQGLQGAQMGQPWCFFPPSYPSYKLENLSQSEMGYTATLTRTTPSFFPKDILTLRLDVMMETENRLHFTIKDPANRRYEVPLETPHVHSRAPSPLYSVEFSEEPFGVIVRRQLDGRVLLNTTVAPLFFADQFLQLSTSLPSQYITGLAEHLSPLMLSTSWNKITLWNRDLAPTPGANLYGSHPFYLALEDGGSAHGVFLLNSNAMDVVLQPSPALSWRSTGGILDVYIFLGPEPKSVVQQYLDVVGYPFMPPYWGLGFHLCRWGYSSTAITRQVVENMTRAHFPLDVQWNDLDYMDSRRDFTFNKDGFRDFPAMVQELHQGGRRYMMIVDPGISSSGPAGSYRPYDEGLRRGVFITNETGQPLIGKVWPGSTAFPDFTNPEALAWWEDMVAEFHDQVPFDGMWIDMNEPSNFIRGSVDGCPNNELENPPYVPGVVGGTLQAATICASSHQFLSTHYNLHNLYGTTEAIASHRALVKARGTRPFVISRSTFAGHGRYAGHWTGDVWSSWEQLASSVPEILQFNLLGVPLVGADVCGFLGNTSEELCVRWTQLGAFYPFMRNHNSLTSLPQEPYSFSEPAQQAMRKALGLRYALLPHLYTLFHQAHVHGETVARPLFLEFPKDSSTWTVDHQMLWGEALLITPVLQPGKAEVTGYFPLGTWYDLQTVPVEALGSLPPPPAAPREPAIHSEGQWVTLPAPLDTINVHLREGYIIPLQGPGLTTTESRKQPMALAVALTKSGEARGELFWDDGESLEVLERGAYTQVIFEARNNTIVNELVHVTSEGAGLQLGKVTVLGVATAPQQVLSNGRPVSNFTYSPDTKVLDICVALLMGEQFLVSWC

SEQ ID NO: 93 - DNA, 2832 bp, synthetic construct
  misc_feature 1..2832: note = Variant of the Homo Sapiens Lysosomal alpha-glucosidase
  source 1..2832: mol_type = other DNA
atggaatggagctgggtctttctcttcttcctgtcagtaacgactggtgtccactccggacacattctgtggcatgatttttctaccgtgcctagagagctttccggttcaagtcaagtcctcgaagaaacacatccagcccatcaggttggcgcatctaggccgggccctcgggacgctcaactccacccagggagacctagggccgttcccactcagtgcgacgtgccagagaactcacgcttcgattgtgcacctgagaaggctatcacgcaagagcagtgcgaggcccgcggatgttgttacataccggctaaacaggggctgcagggtgcgcagatgggccaaccttggtgcttcttcccaccatcctatccgagttacaagctggagaatctctcccagtctgaaatgggatataccgcaacactgactcggaccaccccctccttctttcccaaagatatcttgactctgagacttgacgtaatgatggagacagaaaacaggctccactttaccattaaggaccctgccaatcgccgatacgaggtgcctctggaaacaccacacgtgcacagtagagctccatcacctctgtattctgtcgagttctccgaagagccgtttggcgttatcgtcaggaggcagctcgacgggcgagtgcttctgaacacgactgtggccccgttgttctttgcggatcagtttctgcaactgtcaacaagtctcccttctcagtacattaccgggcttgcagagcatctgtccccactcatgctgagtacttcatggaacaaaatcacactgtggaatagagaccttgctcctactccaggagccaacttgtatggttctcaccctttctacttggccctggaagatggcggatcagcgcatggcgtattcctcctgaattccaacgcaatggacgttgttcttcagccatctcctgctttgagttggagatctacaggcgggatactggacgtctacatctttctgggtccagagcctaaatccgtagtgcagcagtatcttgatgtcgtcggatacccgtttatgccaccatattggggcctggggttccacttgtgccgctggggatattcatccaccgccattacacgacaagttgttgagaatatgaccagggcacattttcctctggatgtacagtggaacgacctggactacatggatagtcgccgcgacttcaccttcaataaggatgggttcagagactttcctgctatggtccaagaacttcaccagggaggcaggaggtacatgatgatcgtagatccgggaatttcttcttctggcccagccggttcatacagaccgtatgacgaaggactgcgacgaggcgtctttatcacgaacgagactggtcagcctttgataggcaaggtttggccagggtccaccgctttcccggatttcacaaatcctgaggcactggcctggtgggaagatatggtcgccgagtttcacgaccaggtcccatttgacgggatgtggatcgacatgaacgagccatccaacttcattagaggaagtgtggatggctgtccgaataatgagctggaaaaccctccttacgtaccaggcgttgttggtgggactcttcaagctgcgacgatttgcgcatcctcccatcagttcctgtcaacccactataacttgcacaatctgtacgggacaacagaggctatcgccagtcatagggccctggtaaaagctagaggaacacgccctttcgttatctctcgctcaacttttgcaggccacggtaggtatgccggacattggaccggcgacgtctggagttcttgggaacagctggcttcctccgttccagagatattgcagtttaacctgttgggagtcccacttgtaggtgcagatgtttgtggcttcctggggaacacctcagaagaattgtgcgtaagatggactcaactgggcgccttctacccttttatgcgcaatcacaactcactggcttctttgcctcaagaaccgtactcatttagtgagccagcacagcaggccatgaggaaggctcttggcctgagatatgcacttctgccgcatctgtacacccttttccaccaggctcatgtccatggagagactgttgcacgacctctgttcttggagttcccaaaagactcttccacgtggacagtcgatcaccagatgctgtggggcgaggctctgctgattacacctgtattgcaacctggtaaggccgaagttaccgggtactttccattggggacctggtatgatctgcaaacagtcccggttgaagctcttggaagtcttccacctccacctgctgcaccaagggagcctgcgatccactctgaaggacagtgggtaactttgcctgcaccgctggacaccatcaatgtccatctgcgcgaaggctacatcataccacttcaaggtcctggactgaccactacagagtctagaaaacaaccaatggctcttgctgttgcactgactaaaagcggcgaagcaaggggtgagctgttctgggacgacggagagtcactggaggtactcgaacgaggcgcgtatacgcaggtcatttttgaggctcgcaataatacgatcgttaacgagctggtccacgtcacttcagaaggtgcaggccttcagttgggcaaggtaactgtcctgggagttgctacagcaccgcagcaggtcttgtccaacggacggcccgtaagcaactttacctatagtcctgataccaaagttctggacatctgcgttgctctgctgatgggtgagcagttcctggtatcatggtgc

SEQ ID NO: 94 - protein, 944 aa, synthetic construct
  REGION 1..944: note = Variant of the Homo Sapiens Lysosomal alpha-glucosidase
MEWSWVFLFFLSVTTGVHSGHILWHDFSTVPRELSGSSQVLEETHPAHQVGASRPGPRDAQLHPGRPRAVPTQCDVPENSRFDCAPEKAITQEQCEARGCCYIPAKQGLQGAQMGQPWCFFPPSYPSYKLENLSQSEMGYTATLTRTTPSFFPKDILTLRLDVMMETENRLHFTIKDPANRRYEVPLETPHVHSRAPSPLYSVEFSEEPFGVIVRRQLDGRVLLNTTVAPLFFADQFLQLSTSLPSQYITGLAEHLSPLMLSTSWNKITLWNRDLAPTPGANLYGSHPFYLALEDGGSAHGVFLLNSNAMDVVLQPSPALSWRSTGGILDVYIFLGPEPKSVVQQYLDVVGYPFMPPYWGLGFHLCRWGYSSTAITRQVVENMTRAHFPLDVQWNDLDYMDSRRDFTFNKDGFRDFPAMVQELHQGGRRYMMIVDPGISSSGPAGSYRPYDEGLRRGVFITNETGQPLIGKVWPGSTAFPDFTNPEALAWWEDMVAEFHDQVPFDGMWIDMNEPSNFIRGSVDGCPNNELENPPYVPGVVGGTLQAATICASSHQFLSTHYNLHNLYGTTEAIASHRALVKARGTRPFVISRSTFAGHGRYAGHWTGDVWSSWEQLASSVPEILQFNLLGVPLVGADVCGFLGNTSEELCVRWTQLGAFYPFMRNHNSLASLPQEPYSFSEPAQQAMRKALGLRYALLPHLYTLFHQAHVHGETVARPLFLEFPKDSSTWTVDHQMLWGEALLITPVLQPGKAEVTGYFPLGTWYDLQTVPVEALGSLPPPPAAPREPAIHSEGQWVTLPAPLDTINVHLREGYIIPLQGPGLTTTESRKQPMALAVALTKSGEARGELFWDDGESLEVLERGAYTQVIFEARNNTIVNELVHVTSEGAGLQLGKVTVLGVATAPQQVLSNGRPVSNFTYSPDTKVLDICVALLMGEQFLVSWC

SEQ ID NO: 95 - DNA, 2832 bp, synthetic construct
  misc_feature 1..2832: note = Variant of the Homo Sapiens Lysosomal alpha-glucosidase
  source 1..2832: mol_type = other DNA
atggaatggagctgggtctttctcttcttcctgtcagtaacgactggtgtccactccggacacattctgtggcatgatttttctaccgtgcctagagagctttccggttcaagtcaagtcctcgaagaaacacatccagcccatcaggttggcgcatctaggccgggccctcgggacgctcaactccacccagggagacctagggccgttcccactcagtgcgacgtgccagagaactcacgcttcgattgtgcacctgagaaggctatcacgcaagagcagtgcgaggcccgcggatgttgttacataccggctaaacaggggctgcagggtgcgcagatgggccaaccttggtgcttcttcccaccatcctatccgagttacaagctggagaatctctcccagtctgaaatgggatataccgcaacactgactcggaccaccccctccttctttcccaaagatatcttgactctgagacttgacgtaatgatggagacagaaaacaggctccactttaccattaaggaccctgccaatcgccgatacgaggtgcctctggaaacaccacacgtgcacagtagagctccatcacctctgtattctgtcgagttctccgaagagccgtttggcgttatcgtcaggaggcagctcgacgggcgagtgcttctgaacacgactgtggccccgttgttctttgcggatcagtttctgcaactgtcaacaagtctcccttctcagtacattaccgggcttgcagagcatctgtccccactcatgctgagtacttcatggaacaaaatcacactgtggaatagagaccttgctcctactccaggagccaacttgtatggttctcaccctttctacttggccctggaagatggcggatcagcgcatggcgtattcctcctgaattccaacgcaatggacgttgttcttcagccatctcctgctttgagttggagatctacaggcgggatactggacgtctacatctttctgggtccagagcctaaatccgtagtgcagcagtatcttgatgtcgtcggatacccgtttatgccaccatattggggcctggggttccacttgtgccgctggggatattcatccaccgccattacacgacaagttgttgagaatatgaccagggcacattttcctctggatgtacagtggaacgacctggactacatggatagtcgccgcgacttcaccttcaataaggatgggttcagagactttcctgctatggtccaagaacttcaccagggaggcaggaggtacatgatgatcgtagatccgggaatttcttcttctggcccagccggttcatacagaccgtatgacgaaggactgcgacgaggcgtctttatcacgaacgagactggtcagcctttgataggcaaggtttggccagggtccaccgctttcccggatttcacaaatcctgaggcactggcctggtgggaagatatggtcgccgagtttcacgaccaggtcccatttgacgggatgtggatcgacatgaacgagccatccaacttcattagaggaagtgtggatggctgtccgaataatgagctggaaaaccctccttacgtaccaggcgttgttggtgggactcttcaagctgcgacgatttgcgcatcctcccatcagttcctgtcaacccactataacttgcacaatctgtacgggcagacagaggctatcgccagtcatagggccctggtaaaagctagaggaacacgccctttcgttatctctcgctcaacttttgcaggccacggtaggtatgccggacattggaccggcgacgtctggagttcttgggaacagctggcttcctccgttccagagatattgcagtttaacctgttgggagtcccacttgtaggtgcagatgtttgtggcttcctggggaacacctcagaagaattgtgcgtaagatggactcaactgggcgccttctacccttttatgcgcaatcacaactcactgacatctttgcctcaagaaccgtactcatttagtgagccagcacagcaggccatgaggaaggctcttggcctgagatatgcacttctgccgcatctgtacacccttttccaccaggctcatgtccatggagagactgttgcacgacctctgttcttggagttcccaaaagactcttccacgtggacagtcgatcaccagatgctgtggggcgaggctctgctgattacacctgtattgcaacctggtaaggccgaagttaccgggtactttccattggggacctggtatgatctgcaaacagtcccggttgaagctcttggaagtcttccacctccacctgctgcaccaagggagcctgcgatccactctgaaggacagtgggtaactttgcctgcaccgctggacaccatcaatgtccatctgcgcgaaggctacatcataccacttcaaggtcctggactgaccactacagagtctagaaaacaaccaatggctcttgctgttgcactgactaaaagcggcgaagcaaggggtgagctgttctgggacgacggagagtcactggaggtactcgaacgaggcgcgtatacgcaggtcatttttgaggctcgcaataatacgatcgttaacgagctggtccacgtcacttcagaaggtgcaggccttcagttgggcaaggtaactgtcctgggagttgctacagcaccgcagcaggtcttgtccaacggacggcccgtaagcaactttacctatagtcctgataccaaagttctggacatctgcgttgctctgctgatgggtgagcagttcctggtatcatggtgc

SEQ ID NO: 96 - protein, 944 aa, synthetic construct
  REGION 1..944: note = Variant of the Homo Sapiens Lysosomal alpha-glucosidase
MEWSWVFLFFLSVTTGVHSGHILWHDFSTVPRELSGSSQVLEETHPAHQVGASRPGPRDAQLHPGRPRAVPTQCDVPENSRFDCAPEKAITQEQCEARGCCYIPAKQGLQGAQMGQPWCFFPPSYPSYKLENLSQSEMGYTATLTRTTPSFFPKDILTLRLDVMMETENRLHFTIKDPANRRYEVPLETPHVHSRAPSPLYSVEFSEEPFGVIVRRQLDGRVLLNTTVAPLFFADQFLQLSTSLPSQYITGLAEHLSPLMLSTSWNKITLWNRDLAPTPGANLYGSHPFYLALEDGGSAHGVFLLNSNAMDVVLQPSPALSWRSTGGILDVYIFLGPEPKSVVQQYLDVVGYPFMPPYWGLGFHLCRWGYSSTAITRQVVENMTRAHFPLDVQWNDLDYMDSRRDFTFNKDGFRDFPAMVQELHQGGRRYMMIVDPGISSSGPAGSYRPYDEGLRRGVFITNETGQPLIGKVWPGSTAFPDFTNPEALAWWEDMVAEFHDQVPFDGMWIDMNEPSNFIRGSVDGCPNNELENPPYVPGVVGGTLQAATICASSHQFLSTHYNLHNLYGQTEAIASHRALVKARGTRPFVISRSTFAGHGRYAGHWTGDVWSSWEQLASSVPEILQFNLLGVPLVGADVCGFLGNTSEELCVRWTQLGAFYPFMRNHNSLTSLPQEPYSFSEPAQQAMRKALGLRYALLPHLYTLFHQAHVHGETVARPLFLEFPKDSSTWTVDHQMLWGEALLITPVLQPGKAEVTGYFPLGTWYDLQTVPVEALGSLPPPPAAPREPAIHSEGQWVTLPAPLDTINVHLREGYIIPLQGPGLTTTESRKQPMALAVALTKSGEARGELFWDDGESLEVLERGAYTQVIFEARNNTIVNELVHVTSEGAGLQLGKVTVLGVATAPQQVLSNGRPVSNFTYSPDTKVLDICVALLMGEQFLVSWC

SEQ ID NO: 97 - DNA, 2832 bp, synthetic construct
  misc_feature 1..2832: note = Variant of the Homo Sapiens Lysosomal alpha-glucosidase
  source 1..2832: mol_type = other DNA
atggaatggagctgggtctttctcttcttcctgtcagtaacgactggtgtccactccggacacattctgtggcatgatttttctaccgtgcctagagagctttccggttcaagtcaagtcctcgaagaaacacatccagcccatcaggttggcgcatctaggccgggccctcgggacgctcaaaagcacccagggagacctagggccgttcccactcagtgcgacgtgccagagaactcacgcttcgattgtgcacctgagaaggctatcacgcaagagcagtgcgaggcccgcggatgttgttacataccggctaaacaggggctgcagggtgcgcagatgggccaaccttggtgcttcttcccaccatcctatccgagttacaagctggagaatctctcccagtctgaaatgggatataccgcaacactgactcggaccaccccctccttctttcccaaagatatcttgactctgagacttgacgtaatgatggagacagaaaacaggctccactttaccattaaggaccctgccaatcgccgatacgaggtgcctctggaaacaccacacgtgcacagtagagctccatcacctctgtattctgtcgagttctccgaagagccgtttggcgttatcgtcaggaggcagctcgacgggcgagtgcttctgaacacgactgtggccccgttgttctttgcggatcagtttctgcaactgtcaacaagtctcccttctcagtacattaccgggcttgcagagcatctgtccccactcatgctgagtacttcatggaacaaaatcacactgtggaatagagaccttgctcctactccaggagccaacttgtatggttctcaccctttctacttggccctggaagatggcggatcagcgcatggcgtattcctcctgaattccaacgcaatggacgttgttcttcagccatctcctgctttgagttggagatctacaggcgggatactggacgtctacatctttctgggtccagagcctaaatccgtagtgcagcagtatcttgatgtcgtcggatacccgtttatgccaccatattggggcctggggttccacttgtgccgctggggatattcatccaccgccattacacgacaagttgttgagaatatgaccagggcacattttcctctggatgtacagtggaacgacctggactacatggatagtcgccgcgacttcaccttcaataaggatgggttcagagactttcctgctatggtccaagaacttcaccagggaggcaggaggtacatgatgatcgtagatccgggaatttcttcttctggcccagccggttcatacagaccgtatgacgaaggactgcgacgaggcgtctttatcacgaacgagactggtcagcctttgataggcaaggtttggccagggtccaccgctttcccggatttcacaaatcctgaggcactggcctggtgggaagatatggtcgccgagtttcacgaccaggtcccatttgacgggatgtggatcgacatgaacgagccatccaacttcattagaggaagtgtggatggctgtccgaataatgagctggaaaaccctccttacgtaccaggcgttgttggtgggactcttcaagctgcgacgatttgcgcatcctcccatcagttcctgtcaacccactataacttgcacaatctgtacgggacaacagaggctatcgccagtcatagggccctggtaaaagctagaggaacacgccctttcgttatctctcgctcaacttttgcaggccacggtaggtatgccggacattggaccggcgacgtctggagttcttgggaacagctggcttcctccgttccagagatattgcagtttaacctgttgggagtcccacttgtaggtgcagatgtttgtggcttcctggggaacacctcagaagaattgtgcgtaagatggactcaactgggcgccttctacccttttatgcgcaatcacaactcactgacatctttgcctcaagaaccgtactcatttagtgagccagcacagcaggccatgaggaaggctcttggcctgagatatgcacttctgccgcatctgtacacccttttccaccaggctcatgtccatggagagactgttgcacgacctctgttcttggagttcccaaaagactcttccacgtggacagtcgatcaccagatgctgtggggcgaggctctgctgattacacctgtattgcaacctggtaaggccgaagttaccgggtactttccattggggacctggtatgatctgcaaacagtcccggttgaagctcttggaagtcttccacctccacctgctgcaccaagggagcctgcgatccactctgaaggacagtgggtaactttgcctgcaccgctggacaccatcaatgtccatctgcgcgaaggctacatcataccacttcaaggtcctggactgaccactacagagtctagaaaacaaccaatggctcttgctgttgcactgactaaaagcggcgaagcaaggggtgagctgttctgggacgacggagagtcactggaggtactcgaacgaggcgcgtatacgcaggtcatttttgaggctcgcaataatacgatcgttaacgagctggtccacgtcacttcagaaggtgcaggccttcagttgggcaaggtaactgtcctgggagttgctacagcaccgcagcaggtcttgtccaacggacggcccgtaagcaactttacctatagtcctgataccaaagttctggacatctgcgttgctctgctgatgggtgagcagttcctggtatcatggtgc

SEQ ID NO: 98 - protein, 944 aa, synthetic construct
  REGION 1..944: note = Variant of the Homo Sapiens Lysosomal alpha-glucosidase
MEWSWVFLFFLSVTTGVHSGHILWHDFSTVPRELSGSSQVLEETHPAHQVGASRPGPRDAQKHPGRPRAVPTQCDVPENSRFDCAPEKAITQEQCEARGCCYIPAKQGLQGAQMGQPWCFFPPSYPSYKLENLSQSEMGYTATLTRTTPSFFPKDILTLRLDVMMETENRLHFTIKDPANRRYEVPLETPHVHSRAPSPLYSVEFSEEPFGVIVRRQLDGRVLLNTTVAPLFFADQFLQLSTSLPSQYITGLAEHLSPLMLSTSWNKITLWNRDLAPTPGANLYGSHPFYLALEDGGSAHGVFLLNSNAMDVVLQPSPALSWRSTGGILDVYIFLGPEPKSVVQQYLDVVGYPFMPPYWGLGFHLCRWGYSSTAITRQVVENMTRAHFPLDVQWNDLDYMDSRRDFTFNKDGFRDFPAMVQELHQGGRRYMMIVDPGISSSGPAGSYRPYDEGLRRGVFITNETGQPLIGKVWPGSTAFPDFTNPEALAWWEDMVAEFHDQVPFDGMWIDMNEPSNFIRGSVDGCPNNELENPPYVPGVVGGTLQAATICASSHQFLSTHYNLHNLYGTTEAIASHRALVKARGTRPFVISRSTFAGHGRYAGHWTGDVWSSWEQLASSVPEILQFNLLGVPLVGADVCGFLGNTSEELCVRWTQLGAFYPFMRNHNSLTSLPQEPYSFSEPAQQAMRKALGLRYALLPHLYTLFHQAHVHGETVARPLFLEFPKDSSTWTVDHQMLWGEALLITPVLQPGKAEVTGYFPLGTWYDLQTVPVEALGSLPPPPAAPREPAIHSEGQWVTLPAPLDTINVHLREGYIIPLQGPGLTTTESRKQPMALAVALTKSGEARGELFWDDGESLEVLERGAYTQVIFEARNNTIVNELVHVTSEGAGLQLGKVTVLGVATAPQQVLSNGRPVSNFTYSPDTKVLDICVALLMGEQFLVSWC

SEQ ID NO: 99 - DNA, 2832 bp, synthetic construct
  misc_feature 1..2832: note = Variant of the Homo Sapiens Lysosomal alpha-glucosidase
  source 1..2832: mol_type = other DNA
atggaatggagctgggtctttctcttcttcctgtcagtaacgactggtgtccactccggacacattctgtggcatgatttttctaccgtgcctagagagctttccggttcaagtcaagtcctcgaagaaacacatccagcccatcaggttggcgcatctaggccgggccctcgggacgctcaactccacccagggagacctagggccgttcccactcagtgcgacgtgccagagaactcacgcttcgattgtgcacctgagaaggctatcacgcaagagcagtgcgaggcccgcggatgttgttacataccggctaaacaggggctgcagggtgcgcagatgggccaaccttggtgcttcttcccaccatcctatccgagttacaagctggagaatctctcccagtctgaaatgggatataccgcaacactgactcggaccaccccctccttctttcccaaagatatcttgactctgagacttgacgtaatgatggagacagaaaacaggctccactttaccattaaggaccctgccaatcgccgatacgaggtgcctctggaaacaccacacgtgcacagtagagctccatcacctctgtattctgtcgagttctccgaagagccgtttggcgttatcgtcaggaggcagctcgacgggcgagtgcttctgaacacgactgtggccccgttgttctttgcggatcagtttctgcaactgtcaacaagtctcccttctcagtacattaccgggcttgcagagcatctgtccccactcatgctgagtacttcatggaacaaaatcacactgtggaatagagaccttgctcctactccaggagccaacttgtatggttctcaccctttctacttggccctggaagatggcggatcagcgcatggcgtattcctcctgaattccaacgcaatggacgttgttcttcagccatctcctgctttgagttggagatctacaggcgggatactggacgtctacatctttctgggtccagagcctaaatccgtagtgcagcagtatcttgatgtcgtcggatacccgtttatgccaccatattggggcctggggttccacttgtgccgctggggatattcatccaccgccattacacgacaagttgttgagaatatgaccagggcacattttcctctggatgtacagtggaacgacctggactacatggatagtcgccgcgacttcaccttcaataaggatgggttcagagactttcctgctatggtccaagaacttcaccagggaggcaggaggtacatgatgatcgtagatccgggaatttcttcttctggcccagccggttcatacagaccgtatgacgaaggactgcgacgaggcgtctttatcacgaacgagactggtcagcctttgataggcaaggtttggccagggtccaccgctttcccggatttcacaaatcctgaggcactggcctggtgggaagatatggtcgccgagtttcacgaccaggtcccatttgacgggatgtggatcgacatgaacgagccatccaacttcattagaggaagtgtggatggctgtccgaataatgagctggaaaaccctccttacgtaccaggcgttgttggtgggactcttcaagctgcgacgatttgcgcatcctcccatcagttcctgtcaacccactataacttgcacaatctgtacgggacaacagaggctatcgccagtcatagggccctggtaaaagctagaggaacacgccctttcgttatctctcgctcaacttttgcaggccacggtaggtatgccggacattggaccggcgacgtctggagttcttgggaacagctggcttcctccgttccagagatattgcagtttaacctgttgggagtcccacttgtaggtgcagatgtttgtggcttcctggggaacacctcagaagaattgtgcgtaagatggactcaactgggcgccttctacccttttatgcgcaatcacaactcactgacatctttgcctcaagaaccgtactcatttagtgagccagcacagcaggccatgaggaaggctcttggcctgagatatgcacttctgccgcatctgtacacccttttccaccaggctcatgtccatggagagactgttgcacgacctctgttcttggagttcccaaaagactcttccacgtggacagtcgatcaccagatgctgtggggcgaggctctgctgattacacctgtattgcaacctggtaaggccgaagttaccgggtactttccattggggacctggtatgatctgcaaacagtcccggttgaagctcttggaagtcttccacctccacctgctgcaccaagggagcctgcgatccactctgaaggacagtgggtaactttgcctgcaccgctggacaccatcaatgtccatctgcgcgaaggctacatcataccacttcaaggtcctggactgaccactacagagtctagaaaacaaccaatggctcttgctgttgcactgactaaaagcggcgaagcaaggggtgagctgttctgggacgacggagagtcactggaggtactcgaacgaggcgcgtatacgcaggtcatttttgaggctcgcaataatacgatcgttaacgagctggtccacgtcacttcagaaggtgcaggccttcagttgtgtaaggtaactgtcctgggagttgctacagcaccgcagcaggtcttgtccaacggacggcccgtaagcaactttacctatagtcctgataccaaagttctggacatctgcgttgctctgctgatgggtgagcagttcctggtatcatggtgc

SEQ ID NO: 100 - protein, 944 aa, synthetic construct
  REGION 1..944: note = Variant of the Homo Sapiens Lysosomal alpha-glucosidase
MEWSWVFLFFLSVTTGVHSGHILWHDFSTVPRELSGSSQVLEETHPAHQVGASRPGPRDAQLHPGRPRAVPTQCDVPENSRFDCAPEKAITQEQCEARGCCYIPAKQGLQGAQMGQPWCFFPPSYPSYKLENLSQSEMGYTATLTRTTPSFFPKDILTLRLDVMMETENRLHFTIKDPANRRYEVPLETPHVHSRAPSPLYSVEFSEEPFGVIVRRQLDGRVLLNTTVAPLFFADQFLQLSTSLPSQYITGLAEHLSPLMLSTSWNKITLWNRDLAPTPGANLYGSHPFYLALEDGGSAHGVFLLNSNAMDVVLQPSPALSWRSTGGILDVYIFLGPEPKSVVQQYLDVVGYPFMPPYWGLGFHLCRWGYSSTAITRQVVENMTRAHFPLDVQWNDLDYMDSRRDFTFNKDGFRDFPAMVQELHQGGRRYMMIVDPGISSSGPAGSYRPYDEGLRRGVFITNETGQPLIGKVWPGSTAFPDFTNPEALAWWEDMVAEFHDQVPFDGMWIDMNEPSNFIRGSVDGCPNNELENPPYVPGVVGGTLQAATICASSHQFLSTHYNLHNLYGTTEAIASHRALVKARGTRPFVISRSTFAGHGRYAGHWTGDVWSSWEQLASSVPEILQFNLLGVPLVGADVCGFLGNTSEELCVRWTQLGAFYPFMRNHNSLTSLPQEPYSFSEPAQQAMRKALGLRYALLPHLYTLFHQAHVHGETVARPLFLEFPKDSSTWTVDHQMLWGEALLITPVLQPGKAEVTGYFPLGTWYDLQTVPVEALGSLPPPPAAPREPAIHSEGQWVTLPAPLDTINVHLREGYIIPLQGPGLTTTESRKQPMALAVALTKSGEARGELFWDDGESLEVLERGAYTQVIFEARNNTIVNELVHVTSEGAGLQLCKVTVLGVATAPQQVLSNGRPVSNFTYSPDTKVLDICVALLMGEQFLVSWC

SEQ ID NO: 101 - DNA, 2832 bp, synthetic construct
  misc_feature 1..2832: note = Variant of the Homo Sapiens Lysosomal alpha-glucosidase
  source 1..2832: mol_type = other DNA
atggaatggagctgggtctttctcttcttcctgtcagtaacgactggtgtccactccggacacattctgtggcatgatttttctaccgtgcctagagagctttccggttcaagtcaagtcctcgaagaaacacatccagcccatcaggttggcgcatctaggccgggccctcgggacgctcaactccacccagggagacctagggccgttcccactcagtgcgacgtgccagagaactcacgcttcgattgtgcacctgagaaggctatcacgcaagagcagtgcgaggcccgcggatgttgttacataccggctaaacaggggctgcagggtgcgcagatgggccaaccttggtgcttcttcccaccatcctatccgagttacaagctggagaatctctcccagtctgaaatgggatataccgcaacactgactcggaccaccccctccttctttcccaaagatatcttgactctgagacttgacgtaatgatggagacagaaaacaggctccactttaccattaaggaccctgccaatcgccgatacgaggtgcctctggaaacaccacacgtgcacagtagagctccatcacctctgtattctgtcgagttctccgaagagccgtttggcgttatcgtcaggaggcagctcgacgggcgagtgcttctgaacacgactgtggccccgttgttctttgcggatcagtttctgcaactgtcaacaagtctcccttctcagtacattaccgggcttgcagagcatctgtccccactcatgctgagtacttcatggaacaaaatcacactgtggaatagagaccttgctcctactccaggagccaacttgtatggttctcaccctttctacttggccctggaagatggcggatcagcgcatggcgtattcctcctgaattccaacgcaatggacgttgttcttcagccatctcctgctttgagttggagatctacaggcgggatactggacgtctacatctttctgggtccagagcctaaatccgtagtgcagcagtatcttgatgtcgtcggatacccgtttatgccaccatattggggcctggggttccacttgtgccgctggggatattcatccaccgccattacacgacaagttgttgagaatatgaccagggcacattttcctctggatgtacagtggaacgacctggactacatggatagtcgccgcgacttcaccttcaataaggatgggttcagagactttcctgctatggtccaagaacttcaccagggaggcaggaggtacatgatgatcgtagatccgggaatttcttcttctggcccagccggttcatacagaccgtatgacgaaggactgcgacgaggcgtctttatcacgaacgagactggtcagcctttgataggcaaggtttggccagggtccaccgctttcccggatttcacaaatcctgaggcactggcctggtgggaagatatggtcgccgagtttcacgaccaggtcccatttgacgggatgtggatcgacatgaacgagccatccaacttcattagaggaagtgtggatggctgtccgaataatgagctggaaaaccctccttacgtaccaggcgttgttggtgggactcttcaagctgcgacgatttgcgcatcctcccatcagttcctgtcaacccactataacttgcacaatctgtacgggcatacagaggctatcgccagtcatagggccctggtaaaagctagaggaacacgccctttcgttatctctcgctcaacttttgcaggccacggtaggtatgccggacattggaccggcgacgtctggagttcttgggaacagctggcttcctccgttccagagatattgcagtttaacctgttgggagtcccacttgtaggtgcagatgtttgtggcttcctggggaacacctcagaagaattgtgcgtaagatggactcaactgggcgccttctacccttttatgcgcaatcacaactcactgacatctttgcctcaagaaccgtactcatttagtgagccagcacagcaggccatgaggaaggctcttggcctgagatatgcacttctgccgcatctgtacacccttttccaccaggctcatgtccatggagagactgttgcacgacctctgttcttggagttcccaaaagactcttccacgtggacagtcgatcaccagatgctgtggggcgaggctctgctgattacacctgtattgcaacctggtaaggccgaagttaccgggtactttccattggggacctggtatgatctgcaaacagtcccggttgaagctcttggaagtcttccacctccacctgctgcaccaagggagcctgcgatccactctgaaggacagtgggtaactttgcctgcaccgctggacaccatcaatgtccatctgcgcgaaggctacatcataccacttcaaggtcctggactgaccactacagagtctagaaaacaaccaatggctcttgctgttgcactgactaaaagcggcgaagcaaggggtgagctgttctgggacgacggagagtcactggaggtactcgaacgaggcgcgtatacgcaggtcatttttgaggctcgcaataatacgatcgttaacgagctggtccacgtcacttcagaaggtgcaggccttcagttgggcaaggtaactgtcctgggagttgctacagcaccgcagcaggtcttgtccaacggacggcccgtaagcaactttacctatagtcctgataccaaagttctggacatctgcgttgctctgctgatgggtgagcagttcctggtatcatggtgc

SEQ ID NO: 102 - protein, 944 aa, synthetic construct
  REGION 1..944: note = Variant of the Homo Sapiens Lysosomal alpha-glucosidase
MEWSWVFLFFLSVTTGVHSGHILWHDFSTVPRELSGSSQVLEETHPAHQVGASRPGPRDAQLHPGRPRAVPTQCDVPENSRFDCAPEKAITQEQCEARGCCYIPAKQGLQGAQMGQPWCFFPPSYPSYKLENLSQSEMGYTATLTRTTPSFFPKDILTLRLDVMMETENRLHFTIKDPANRRYEVPLETPHVHSRAPSPLYSVEFSEEPFGVIVRRQLDGRVLLNTTVAPLFFADQFLQLSTSLPSQYITGLAEHLSPLMLSTSWNKITLWNRDLAPTPGANLYGSHPFYLALEDGGSAHGVFLLNSNAMDVVLQPSPALSWRSTGGILDVYIFLGPEPKSVVQQYLDVVGYPFMPPYWGLGFHLCRWGYSSTAITRQVVENMTRAHFPLDVQWNDLDYMDSRRDFTFNKDGFRDFPAMVQELHQGGRRYMMIVDPGISSSGPAGSYRPYDEGLRRGVFITNETGQPLIGKVWPGSTAFPDFTNPEALAWWEDMVAEFHDQVPFDGMWIDMNEPSNFIRGSVDGCPNNELENPPYVPGVVGGTLQAATICASSHQFLSTHYNLHNLYGHTEAIASHRALVKARGTRPFVISRSTFAGHGRYAGHWTGDVWSSWEQLASSVPEILQFNLLGVPLVGADVCGFLGNTSEELCVRWTQLGAFYPFMRNHNSLTSLPQEPYSFSEPAQQAMRKALGLRYALLPHLYTLFHQAHVHGETVARPLFLEFPKDSSTWTVDHQMLWGEALLITPVLQPGKAEVTGYFPLGTWYDLQTVPVEALGSLPPPPAAPREPAIHSEGQWVTLPAPLDTINVHLREGYIIPLQGPGLTTTESRKQPMALAVALTKSGEARGELFWDDGESLEVLERGAYTQVIFEARNNTIVNELVHVTSEGAGLQLGKVTVLGVATAPQQVLSNGRPVSNFTYSPDTKVLDICVALLMGEQFLVSWC

SEQ ID NO: 103 - DNA, 2832 bp, synthetic construct
  misc_feature 1..2832: note = Variant of the Homo Sapiens Lysosomal alpha-glucosidase
  source 1..2832: mol_type = other DNA
atggaatggagctgggtctttctcttcttcctgtcagtaacgactggtgtccactccggacacattctgtggcatgatttttctaccgtgcctagagagctttccggttcaagtcaagtcctcgaagaaacacatccagcccatcaggttggcgcatctaggccgggccctcgggacgctcaactccacccagggagacctagggccgttcccactcagtgcgacgtgccagagaactcacgcttcgattgtgcacctgagaaggctatcacgcaagagcagtgcgaggcccgcggatgttgttacataccggctaaacaggggctgcagggtgcgcagatgggccaaccttggtgcttcttcccaccatcctatccgagttacaagctggagaatctctcccagtctgaaatgggatataccgcaacactgactcggaccaccccctccttctttcccaaagatatcttgactctgagacttgacgtaatgatggagacagaaaacaggctccactttaccattaaggaccctgccaatcgccgatacgaggtgcctctggaaacaccacacgtgcacagtagagctccatcacctctgtattctgtcgagttctccgaagagccgtttggcgttatcgtcaggaggcagctcgacgggcgagtgcttctgaacacgactgtggccccgttgttctttgcggatcagtttctgcaactgtcaacaagtctcccttctcagtacattaccgggcttgcagagcatctgtccccactcatgctgagtacttcatggaacaaaatcacactgtggaatagagaccttgctcctactccaggagccaacttgtatggttctcaccctttctacttggccctggaagatggcggatcagcgcatggcgtattcctcctgaattccaacgcaatggacgttgttcttcagccatctcctgctttgagttggagatctacaggcgggatactggacgtctacatctttctgggtccagagcctaaatccgtagtgcagcagtatcttgatgtcgtcggatacccgtttatgccaccatattggggcctggggttccacttgtgccgctggggatattcatccaccgccattacacgacaagttgttgagaatatgaccagggcacattttcctctggatgtacagtggaacgacctggactacatggatagtcgccgcgacttcaccttcaataaggatgggttcagagactttcctgctatggtccaagaacttcaccagggaggcaggaggtacatgatgatcgtagatccgggaatttcttcttctggcccagccggttcatacagaccgtatgacgaaggactgcgacgaggcgtctttatcacgaacgagactggtcagcctttgataggcaaggtttggccagggtccaccgctttcccggatttcacaaatcctgaggcactggcctggtgggaagatatggtcgccgagtttcacgaccaggtcccatttgacgggatgtggatcgacatgaacgagccatccaacttcattagaggaagtgtggatggctgtccgaataatgagctggaaaaccctccttacgtaccaggcgttgttggtgggactcttcaagctgcgacgatttgcgcatcctcccatcagttcctgtcaacccactataacttgcacaatctgtacgggacaacagaggctatcgccagtcatagggccctggtaaaagctagaggaacacgccctttcgttatctctcgctcaacttttgcaggccacggtaggtatgccggacattggaccggcgacgtctggagttcttgggaacagctggcttcctccgttccagagatattgcagtttaacctgttgggagtcccacttgtaggtgcagatgtttgtggcttcctggggaacacctcagaagaattgtgcgtaagatggactcaactgggcgccttctacccttttatgcgcaatcacaactcactgacatctttgcctcaagaaccgtactcatttagtgagccagcacagcaggccatgaggaaggctcttggcctgagatatgcacttctgccgcatctgtacacccttttccaccaggctcatgtcgttggagagactgttgcacgacctctgttcttggagttcccaaaagactcttccacgtggacagtcgatcaccagatgctgtggggcgaggctctgctgattacacctgtattgcaacctggtaaggccgaagttaccgggtactttccattggggacctggtatgatctgcaaacagtcccggttgaagctcttggaagtcttccacctccacctgctgcaccaagggagcctgcgatccactctgaaggacagtgggtaactttgcctgcaccgctggacaccatcaatgtccatctgcgcgaaggctacatcataccacttcaaggtcctggactgaccactacagagtctagaaaacaaccaatggctcttgctgttgcactgactaaaagcggcgaagcaaggggtgagctgttctgggacgacggagagtcactggaggtactcgaacgaggcgcgtatacgcaggtcatttttgaggctcgcaataatacgatcgttaacgagctggtccacgtcacttcagaaggtgcaggccttcagttgggcaaggtaactgtcctgggagttgctacagcaccgcagcaggtcttgtccaacggacggcccgtaagcaactttacctatagtcctgataccaaagttctggacatctgcgttgctctgctgatgggtgagcagttcctggtatcatggtgc

SEQ ID NO: 104 - protein, 944 aa, synthetic construct
  REGION 1..944: note = Variant of the Homo Sapiens Lysosomal alpha-glucosidase
MEWSWVFLFFLSVTTGVHSGHILWHDFSTVPRELSGSSQVLEETHPAHQVGASRPGPRDAQLHPGRPRAVPTQCDVPENSRFDCAPEKAITQEQCEARGCCYIPAKQGLQGAQMGQPWCFFPPSYPSYKLENLSQSEMGYTATLTRTTPSFFPKDILTLRLDVMMETENRLHFTIKDPANRRYEVPLETPHVHSRAPSPLYSVEFSEEPFGVIVRRQLDGRVLLNTTVAPLFFADQFLQLSTSLPSQYITGLAEHLSPLMLSTSWNKITLWNRDLAPTPGANLYGSHPFYLALEDGGSAHGVFLLNSNAMDVVLQPSPALSWRSTGGILDVYIFLGPEPKSVVQQYLDVVGYPFMPPYWGLGFHLCRWGYSSTAITRQVVENMTRAHFPLDVQWNDLDYMDSRRDFTFNKDGFRDFPAMVQELHQGGRRYMMIVDPGISSSGPAGSYRPYDEGLRRGVFITNETGQPLIGKVWPGSTAFPDFTNPEALAWWEDMVAEFHDQVPFDGMWIDMNEPSNFIRGSVDGCPNNELENPPYVPGVVGGTLQAATICASSHQFLSTHYNLHNLYGTTEAIASHRALVKARGTRPFVISRSTFAGHGRYAGHWTGDVWSSWEQLASSVPEILQFNLLGVPLVGADVCGFLGNTSEELCVRWTQLGAFYPFMRNHNSLTSLPQEPYSFSEPAQQAMRKALGLRYALLPHLYTLFHQAHVVGETVARPLFLEFPKDSSTWTVDHQMLWGEALLITPVLQPGKAEVTGYFPLGTWYDLQTVPVEALGSLPPPPAAPREPAIHSEGQWVTLPAPLDTINVHLREGYIIPLQGPGLTTTESRKQPMALAVALTKSGEARGELFWDDGESLEVLERGAYTQVIFEARNNTIVNELVHVTSEGAGLQLGKVTVLGVATAPQQVLSNGRPVSNFTYSPDTKVLDICVALLMGEQFLVSWC

SEQ ID NO: 105 - DNA, 2832 bp, synthetic construct
  misc_feature 1..2832: note = Variant of the Homo Sapiens Lysosomal alpha-glucosidase
  source 1..2832: mol_type = other DNA
atggaatggagctgggtctttctcttcttcctgtcagtaacgactggtgtccactccggacacattctgtggcatgatttttctaccgtgcctagagagctttccggttcaagtcaagtcctcgaagaaacacatccagcccatcaggttggcgcatctaggccgggccctcgggacgctcaactccacccagggagacctagggccgttcccactcagtgcgacgtgccagagaactcacgcttcgattgtgcacctgagaaggctatcacgcaagagcagtgcgaggcccgcggatgttgttacataccggctaaacaggggctgcagggtgcgcagatgggccaaccttggtgcttcttcccaccatcctatccgagttacaagctggagaatctctcccagtctgaaatgggatataccgcaacactgactcggaccaccccctccttctttcccaaagatatcttgactctgagacttgacgtaatgatggagacagaaaacaggctccactttaccattaaggaccctgccaatcgccgatacgaggtgcctctggaaacaccacacgtgcacagtagagctccatcacctctgtattctgtcgagttctccgaagagccgtttggcgttatcgtcaggaggcagctcgacgggcgagtgcttctgaacacgactgtggccccgttgttctttgcggatcagtttctgcaactgtcaacaagtctcccttctcagtacattaccgggcttgcagagcatctgtccccactcatgctgagtacttcatggaacaaaatcacactgtggaatagagaccttgctcctactccaggagccaacttgtatggttctcaccctttctacttggccctggaagatggcggatcagcgcatggcgtattcctcctgaattccaacgcaatggacgttgttcttcagccatctcctgctttgagttggagatctacaggcgggatactggacgtctacatctttctgggtccagagcctaaatccgtagtgcagcagtatcttgatgtcgtcggatacccgtttatgccaccatattggggcctggggttccacttgtgccgctggggatattcatccaccgccattacacgacaagttgttgagaatatgaccagggcacattttcctctggatgtacagtggaacgacctggactacatggatagtcgccgcgacttcaccttcaataaggatgggttcagagactttcctgctatggtccaagaacttcaccagggaggcaggaggtacatgatgatcgtagatccgggaatttcttcttctggcccagccggttcatacagaccgtatgacgaaggactgcgacgaggcgtctttatcacgaacgagactggtcagcctttgataggcaaggtttggccagggtccaccgctttcccggatttcacaaatcctgaggcactggcctggtgggaagatatggtcgccgagtttcacgaccaggtcccatttgacgggatgtggatcgacatgaacgagccatccaacttcattagaggaagttcggatggctgtccgaataatgagctggaaaaccctccttacgtaccaggcgttgttggtgggactcttcaagctgcgacgatttgcgcatcctcccatcagttcctgtcaacccactataacttgcacaatctgtacgggacaacagaggctatcgccagtcatagggccctggtaaaagctagaggaacacgccctttcgttatctctcgctcaacttttgcaggccacggtaggtatgccggacattggaccggcgacgtctggagttcttgggaacagctggcttcctccgttccagagatattgcagtttaacctgttgggagtcccacttgtaggtgcagatgtttgtggcttcctggggaacacctcagaagaattgtgcgtaagatggactcaactgggcgccttctacccttttatgcgcaatcacaactcactgacatctttgcctcaagaaccgtactcatttagtgagccagcacagcaggccatgaggaaggctcttggcctgagatatgcacttctgccgcatctgtacacccttttccaccaggctcatgtccatggagagactgttgcacgacctctgttcttggagttcccaaaagactcttccacgtggacagtcgatcaccagatgctgtggggcgaggctctgctgattacacctgtattgcaacctggtaaggccgaagttaccgggtactttccattggggacctggtatgatctgcaaacagtcccggttgaagctcttggaagtcttccacctccacctgctgcaccaagggagcctgcgatccactctgaaggacagtgggtaactttgcctgcaccgctggacaccatcaatgtccatctgcgcgaaggctacatcataccacttcaaggtcctggactgaccactacagagtctagaaaacaaccaatggctcttgctgttgcactgactaaaagcggcgaagcaaggggtgagctgttctgggacgacggagagtcactggaggtactcgaacgaggcgcgtatacgcaggtcatttttgaggctcgcaataatacgatcgttaacgagctggtccacgtcacttcagaaggtgcaggccttcagttgggcaaggtaactgtcctgggagttgctacagcaccgcagcaggtcttgtccaacggacggcccgtaagcaactttacctatagtcctgataccaaagttctggacatctgcgttgctctgctgatgggtgagcagttcctggtatcatggtgc

SEQ ID NO: 106 - protein, 944 aa, synthetic construct
  REGION 1..944: note = Variant of the Homo Sapiens Lysosomal alpha-glucosidase
MEWSWVFLFFLSVTTGVHSGHILWHDFSTVPRELSGSSQVLEETHPAHQVGASRPGPRDAQLHPGRPRAVPTQCDVPENSRFDCAPEKAITQEQCEARGCCYIPAKQGLQGAQMGQPWCFFPPSYPSYKLENLSQSEMGYTATLTRTTPSFFPKDILTLRLDVMMETENRLHFTIKDPANRRYEVPLETPHVHSRAPSPLYSVEFSEEPFGVIVRRQLDGRVLLNTTVAPLFFADQFLQLSTSLPSQYITGLAEHLSPLMLSTSWNKITLWNRDLAPTPGANLYGSHPFYLALEDGGSAHGVFLLNSNAMDVVLQPSPALSWRSTGGILDVYIFLGPEPKSVVQQYLDVVGYPFMPPYWGLGFHLCRWGYSSTAITRQVVENMTRAHFPLDVQWNDLDYMDSRRDFTFNKDGFRDFPAMVQELHQGGRRYMMIVDPGISSSGPAGSYRPYDEGLRRGVFITNETGQPLIGKVWPGSTAFPDFTNPEALAWWEDMVAEFHDQVPFDGMWIDMNEPSNFIRGSSDGCPNNELENPPYVPGVVGGTLQAATICASSHQFLSTHYNLHNLYGTTEAIASHRALVKARGTRPFVISRSTFAGHGRYAGHWTGDVWSSWEQLASSVPEILQFNLLGVPLVGADVCGFLGNTSEELCVRWTQLGAFYPFMRNHNSLTSLPQEPYSFSEPAQQAMRKALGLRYALLPHLYTLFHQAHVHGETVARPLFLEFPKDSSTWTVDHQMLWGEALLITPVLQPGKAEVTGYFPLGTWYDLQTVPVEALGSLPPPPAAPREPAIHSEGQWVTLPAPLDTINVHLREGYIIPLQGPGLTTTESRKQPMALAVALTKSGEARGELFWDDGESLEVLERGAYTQVIFEARNNTIVNELVHVTSEGAGLQLGKVTVLGVATAPQQVLSNGRPVSNFTYSPDTKVLDICVALLMGEQFLVSWC

SEQ ID NO: 107 - DNA, 2832 bp, synthetic construct
  misc_feature 1..2832: note = Variant of the Homo Sapiens Lysosomal alpha-glucosidase
  source 1..2832: mol_type = other DNA
atggaatggagctgggtctttctcttcttcctgtcagtaacgactggtgtccactccggacacattctgtttcatgatttttctaccgtgcctagagagctttccggttcaagtcaagtcctcgaagaaacacatccagcccatcaggttggcgcatctaggccgggccctcgggacgctcaactccacccagggagacctagggccgttcccactcagtgcgacgtgccagagaactcacgcttcgattgtgcacctgagaaggctatcacgcaagagcagtgcgaggcccgcggatgttgttacataccggctaaacaggggctgcagggtgcgcagatgggccaaccttggtgcttcttcccaccatcctatccgagttacaagctggagaatctctcccagtctgaaatgggatataccgcaacactgactcggaccaccccctccttctttcccaaagatatcttgactctgagacttgacgtaatgatggagacagaaaacaggctccactttaccattaaggaccctgccaatcgccgatacgaggtgcctctggaaacaccacacgtgcacagtagagctccatcacctctgtattctgtcgagttctccgaagagccgtttggcgttatcgtcaggaggcagctcgacgggcgagtgcttctgaacacgactgtggccccgttgttctttgcggatcagtttctgcaactgtcaacaagtctcccttctcagtacattaccgggcttgcagagcatctgtccccactcatgctgagtacttcatggaacaaaatcacactgtggaatagagaccttgctcctactccaggagccaacttgtatggttctcaccctttctacttggccctggaagatggcggatcagcgcatggcgtattcctcctgaattccaacgcaatggacgttgttcttcagccatctcctgctttgagttggagatctacaggcgggatactggacgtctacatctttctgggtccagagcctaaatccgtagtgcagcagtatcttgatgtcgtcggatacccgtttatgccaccatattggggcctggggttccacttgtgccgctggggatattcatccaccgccattacacgacaagttgttgagaatatgaccagggcacattttcctctggatgtacagtggaacgacctggactacatggatagtcgccgcgacttcaccttcaataaggatgggttcagagactttcctgctatggtccaagaacttcaccagggaggcaggaggtacatgatgatcgtagatccgggaatttcttcttctggcccagccggttcatacagaccgtatgacgaaggactgcgacgaggcgtctttatcacgaacgagactggtcagcctttgataggcaaggtttggccagggtccaccgctttcccggatttcacaaatcctgaggcactggcctggtgggaagatatggtcgccgagtttcacgaccaggtcccatttgacgggatgtggatcgacatgaacgagccatccaacttcattagaggaagtgtggatggctgtccgaataatgagctggaaaaccctccttacgtaccaggcgttgttggtgggactcttcaagctgcgacgatttgcgcatcctcccatcagttcctgtcaacccactataacttgcacaatctgtacgggacaacagaggctatcgccagtcatagggccctggtaaaagctagaggaacacgccctttcgttatctctcgctcaacttttgcaggccacggtaggtatgccggacattggaccggcgacgtctggagttcttgggaacagctggcttcctccgttccagagatattgcagtttaacctgttgggagtcccacttgtaggtgcagatgtttgtggcttcctggggaacacctcagaagaattgtgcgtaagatggactcaactgggcgccttctacccttttatgcgcaatcacaactcactgacatctttgcctcaagaaccgtactcatttagtgagccagcacagcaggccatgaggaaggctcttggcctgagatatgcacttctgccgcatctgtacacccttttccaccaggctcatgtccatggagagactgttgcacgacctctgttcttggagttcccaaaagactcttccacgtggacagtcgatcaccagatgctgtggggcgaggctctgctgattacacctgtattgcaacctggtaaggccgaagttaccgggtactttccattggggacctggtatgatctgcaaacagtcccggttgaagctcttggaagtcttccacctccacctgctgcaccaagggagcctgcgatccactctgaaggacagtgggtaactttgcctgcaccgctggacaccatcaatgtccatctgcgcgaaggctacatcataccacttcaaggtcctggactgaccactacagagtctagaaaacaaccaatggctcttgctgttgcactgactaaaagcggcgaagcaaggggtgagctgttctgggacgacggagagtcactggaggtactcgaacgaggcgcgtatacgcaggtcatttttgaggctcgcaataatacgatcgttaacgagctggtccacgtcacttcagaaggtgcaggccttcagttgggcaaggtaactgtcctgggagttgctacagcaccgcagcaggtcttgtccaacggacggcccgtaagcaactttacctatagtcctgataccaaagttctggacatctgcgttgctctgctgatgggtgagcagttcctggtatcatggtgc

SEQ ID NO: 108 - protein, 944 aa, synthetic construct
  REGION 1..944: note = Variant of the Homo Sapiens Lysosomal alpha-glucosidase
MEWSWVFLFFLSVTTGVHSGHILFHDFSTVPRELSGSSQVLEETHPAHQVGASRPGPRDAQLHPGRPRAVPTQCDVPENSRFDCAPEKAITQEQCEARGCCYIPAKQGLQGAQMGQPWCFFPPSYPSYKLENLSQSEMGYTATLTRTTPSFFPKDILTLRLDVMMETENRLHFTIKDPANRRYEVPLETPHVHSRAPSPLYSVEFSEEPFGVIVRRQLDGRVLLNTTVAPLFFADQFLQLSTSLPSQYITGLAEHLSPLMLSTSWNKITLWNRDLAPTPGANLYGSHPFYLALEDGGSAHGVFLLNSNAMDVVLQPSPALSWRSTGGILDVYIFLGPEPKSVVQQYLDVVGYPFMPPYWGLGFHLCRWGYSSTAITRQVVENMTRAHFPLDVQWNDLDYMDSRRDFTFNKDGFRDFPAMVQELHQGGRRYMMIVDPGISSSGPAGSYRPYDEGLRRGVFITNETGQPLIGKVWPGSTAFPDFTNPEALAWWEDMVAEFHDQVPFDGMWIDMNEPSNFIRGSVDGCPNNELENPPYVPGVVGGTLQAATICASSHQFLSTHYNLHNLYGTTEAIASHRALVKARGTRPFVISRSTFAGHGRYAGHWTGDVWSSWEQLASSVPEILQFNLLGVPLVGADVCGFLGNTSEELCVRWTQLGAFYPFMRNHNSLTSLPQEPYSFSEPAQQAMRKALGLRYALLPHLYTLFHQAHVHGETVARPLFLEFPKDSSTWTVDHQMLWGEALLITPVLQPGKAEVTGYFPLGTWYDLQTVPVEALGSLPPPPAAPREPAIHSEGQWVTLPAPLDTINVHLREGYIIPLQGPGLTTTESRKQPMALAVALTKSGEARGELFWDDGESLEVLERGAYTQVIFEARNNTIVNELVHVTSEGAGLQLGKVTVLGVATAPQQVLSNGRPVSNFTYSPDTKVLDICVALLMGEQFLVSWC

SEQ ID NO: 109 - DNA, 2832 bp, synthetic construct
  misc_feature 1..2832: note = Variant of the Homo Sapiens Lysosomal alpha-glucosidase
  source 1..2832: mol_type = other DNA
atggaatggagctgggtctttctcttcttcctgtcagtaacgactggtgtccactccggacacattctgtggcatgatttttctaccgtgcctagagagctttccggttcaagtcaagtcctcgaagaaacacatccagcccatcaggttggcgcatctaggccgggccctcgggacgctcaactccacccagggagacctagggccgttcccactcagtgcgacgtgccagagaactcacgcttcgattgtgcacctgagaaggctatcacgcaagagcagtgcgaggcccgcggatgttgttacataccggctaaacaggggctgcagggtgcgcagatgggccaaccttggtgcttcttcccaccatcctatccgagttacaagctggagaatctctcccagtctgaaatgggatataccgcaacactgactcggaccaccccctccttctttcccaaagatatcttgactctgagacttgacgtaatgatggagacagaaaacaggctccactttaccattaaggaccctgccaatcgccgatacgaggtgcctctggaaacaccacacgtgcacagtagagctccatcacctctgtattctgtcgagttctccgaagagccgtttggcgttatcgtcaggaggcagctcgacgggcgagtgcttctgaacacgactgtggccccgttgttctttgcggatcagtttctgcaactgtcaacaagtctcccttctcagtacattaccgggcttgcagagcatctgtccccactcatgctgagtacttcatggaacaaaatcacactgtggaatagagaccttgctcctactccaggagccaacttgtatggttctcaccctttctacttggccctggaagatggcggatcagcgcatggcgtattcctcctgaattccaacgcaatggacgttgttcttcagccatctcctgctttgagttggagatctacaggcgggatactggacgtctacatctttctgggtccagagcctaaatccgtagtgcagcagtatcttgatgtcgtcggatacccgtttatgccaccatattggggcctggggttccacttgtgccgctggggatattcatccaccgccattacacgacaagttgttgagaatatgaccagggcacattttcctctggatgtacagtggaacgacctggactacatggatagtcgccgcgacttcaccttcaataaggatgggttcagagactttcctgctatggtccaagaacttcaccagggaggcaggaggtacatgatgatcgtagatccgggaatttcttcttctggcccagccggttcatacagaccgtatgacgaaggactgcgacgaggcgtctttatcacgaacgagactggtcagcctttgataggcaaggtttggccagggtccaccgctttcccggatttcacaaatcctgaggcactggcctggtgggaagatatggtcgccgagtttcacgaccaggtcccatttgacgggatgtggatcgacatgaacgagccatccaacttcattagaggaagtgtggatggctgtccgaataatgagctggaaaaccctccttacgtaccaggcgttgttggtgggactcttcaagctgcgacgatttgcgcatcctcccatcagttcctgtcaacccactataacttgcacaatctgtacgggatgacagaggctatcgccagtcatagggccctggtaaaagctagaggaacacgccctttcgttatctctcgctcaacttttgcaggccacggtaggtatgccggacattggaccggcgacgtctggagttcttgggaacagctggcttcctccgttccagagatattgcagtttaacctgttgggagtcccacttgtaggtgcagatgtttgtggcttcctggggaacacctcagaagaattgtgcgtaagatggactcaactgggcgccttctacccttttatgcgcaatcacaactcactgacatctttgcctcaagaaccgtactcatttagtgagccagcacagcaggccatgaggaaggctcttggcctgagatatgcacttctgccgcatctgtacacccttttccaccaggctcatgtccatggagagactgttgcacgacctctgttcttggagttcccaaaagactcttccacgtggacagtcgatcaccagatgctgtggggcgaggctctgctgattacacctgtattgcaacctggtaaggccgaagttaccgggtactttccattggggacctggtatgatctgcaaacagtcccggttgaagctcttggaagtcttccacctccacctgctgcaccaagggagcctgcgatccactctgaaggacagtgggtaactttgcctgcaccgctggacaccatcaatgtccatctgcgcgaaggctacatcataccacttcaaggtcctggactgaccactacagagtctagaaaacaaccaatggctcttgctgttgcactgactaaaagcggcgaagcaaggggtgagctgttctgggacgacggagagtcactggaggtactcgaacgaggcgcgtatacgcaggtcatttttgaggctcgcaataatacgatcgttaacgagctggtccacgtcacttcagaaggtgcaggccttcagttgggcaaggtaactgtcctgggagttgctacagcaccgcagcaggtcttgtccaacggacggcccgtaagcaactttacctatagtcctgataccaaagttctggacatctgcgttgctctgctgatgggtgagcagttcctggtatcatggtgc

SEQ ID NO: 110 - protein, 944 aa, synthetic construct
  REGION 1..944: note = Variant of the Homo Sapiens Lysosomal alpha-glucosidase
MEWSWVFLFFLSVTTGVHSGHILWHDFSTVPRELSGSSQVLEETHPAHQVGASRPGPRDAQLHPGRPRAVPTQCDVPENSRFDCAPEKAITQEQCEARGCCYIPAKQGLQGAQMGQPWCFFPPSYPSYKLENLSQSEMGYTATLTRTTPSFFPKDILTLRLDVMMETENRLHFTIKDPANRRYEVPLETPHVHSRAPSPLYSVEFSEEPFGVIVRRQLDGRVLLNTTVAPLFFADQFLQLSTSLPSQYITGLAEHLSPLMLSTSWNKITLWNRDLAPTPGANLYGSHPFYLALEDGGSAHGVFLLNSNAMDVVLQPSPALSWRSTGGILDVYIFLGPEPKSVVQQYLDVVGYPFMPPYWGLGFHLCRWGYSSTAITRQVVENMTRAHFPLDVQWNDLDYMDSRRDFTFNKDGFRDFPAMVQELHQGGRRYMMIVDPGISSSGPAGSYRPYDEGLRRGVFITNETGQPLIGKVWPGSTAFPDFTNPEALAWWEDMVAEFHDQVPFDGMWIDMNEPSNFIRGSVDGCPNNELENPPYVPGVVGGTLQAATICASSHQFLSTHYNLHNLYGMTEAIASHRALVKARGTRPFVISRSTFAGHGRYAGHWTGDVWSSWEQLASSVPEILQFNLLGVPLVGADVCGFLGNTSEELCVRWTQLGAFYPFMRNHNSLTSLPQEPYSFSEPAQQAMRKALGLRYALLPHLYTLFHQAHVHGETVARPLFLEFPKDSSTWTVDHQMLWGEALLITPVLQPGKAEVTGYFPLGTWYDLQTVPVEALGSLPPPPAAPREPAIHSEGQWVTLPAPLDTINVHLREGYIIPLQGPGLTTTESRKQPMALAVALTKSGEARGELFWDDGESLEVLERGAYTQVIFEARNNTIVNELVHVTSEGAGLQLGKVTVLGVATAPQQVLSNGRPVSNFTYSPDTKVLDICVALLMGEQFLVSWC

SEQ ID NO: 111 - DNA, 2832 bp, synthetic construct
  misc_feature 1..2832: note = Variant of the Homo Sapiens Lysosomal alpha-glucosidase
  source 1..2832: mol_type = other DNA
atggaatggagctgggtctttctcttcttcctgtcagtaacgactggtgtccactccggacacattctgtggcatgatttttctaccgtgcctagagagctttccggttcaagtcaagtcctcgaagaaacacatccagcccatcaggttggcgcatctaggccgggccctcgggacgctcaactccacccagggagacctagggccgttcccactcagtgcgacgtgccagagaactcacgcttcgattgtgcacctgagaaggctatcacgcaagagcagtgcgaggcccgcggatgttgttacataccggctaaacaggggctgcagggtgcgcagatgggccaaccttggtgcttcttcccaccatcctatccgagttacaagctggagaatctctcccagtctgaaatgggatataccgcaacactgactcggaccaccccctccttctttcccaaagatatcttgactctgagacttgacgtaatgatggagacagaaaacaggctccactttaccattaaggaccctgccaatcgccgatacgaggtgcctctggaaacaccacacgtgcacagtagagctccatcacctctgtattctgtcgagttctccgaagagccgtttggcgttatcgtcaggaggcagctcgacgggcgagtgcttctgaacacgactgtggccccgttgttctttgcggatcagtttctgcaactgtcaacaagtctcccttctcagtacattaccgggcttgcagagcatctgtccccactcatgctgagtacttcatggaacaaaatcacactgtggaatagagaccttgctcctactccaggagccaacttgtatggttctcaccctttctacttggccctggaagatggcggatcagcgcatggcgtattcctcctgaattccaacgcaatggacgttgttcttcagccatctcctgctttgagttggagatctacaggcgggatactggacgtctacatctttctgggtccagagcctaaatccgtagtgcagcagtatcttgatgtcgtcggatacccgtttatgccaccatattggggcctggggttccacttgtgccgctggggatattcatccaccgccattacacgacaagttgttgagaatatgaccagggcacattttcctctggatgtacagtggaacgacctggactacatggatagtcgccgcgacttcaccttcaataaggatgggttcagagactttcctgctatggtccaagaacttcaccagggaggcaggaggtacatgatgatcgtagatccgggaatttcttcttctggcccagccggttcatacagaccgtatgacgaaggactgcgacgaggcgtctttatcacgaacgagactggtcagcctttgataggcaaggtttggccagggtccaccgctttcccggatttcacaaatcctgaggcactggcctggtgggaagatatggtcgccgagtttcacgaccaggtcccatttgacgggatgtggatcgacatgaacgagccatccaacttcattagaggaagtgtggatggctgtccgaataatgagctggaaaaccctccttacgtaccaggcgttgttggtgggactcttcaagctgcgacgatttgcgcatcctcccatcagttcctgtcaacccactataacttgcacaatctgtacgggacaacagaggctatcgccagtcatagggccctggtaaaagctagaggaacacgccctttcgttatctctcgctcaacttttgcaggccacggtaggtatgccggacattggaccggcgacgtctggagttcttgggaacagctggcttcctccgttccagagatattgcagtttaacctgttgggagtcccacttgtaggtgcagatgtttgtggcttcctggggaacacctcagaagaattgtgcgtaagatggactcaactgggcgccttctacccttttatgcgcaatcacaactcactgacatctttgcctcaagaaccgtactcatttagtgagccagcacagcaggccatgaggaaggctcttggcctgagatatgcacttctgccgcatctgtacacccttttccaccaggctcatgtcagtggagagactgttgcacgacctctgttcttggagttcccaaaagactcttccacgtggacagtcgatcaccagatgctgtggggcgaggctctgctgattacacctgtattgcaacctggtaaggccgaagttaccgggtactttccattggggacctggtatgatctgcaaacagtcccggttgaagctcttggaagtcttccacctccacctgctgcaccaagggagcctgcgatccactctgaaggacagtgggtaactttgcctgcaccgctggacaccatcaatgtccatctgcgcgaaggctacatcataccacttcaaggtcctggactgaccactacagagtctagaaaacaaccaatggctcttgctgttgcactgactaaaagcggcgaagcaaggggtgagctgttctgggacgacggagagtcactggaggtactcgaacgaggcgcgtatacgcaggtcatttttgaggctcgcaataatacgatcgttaacgagctggtccacgtcacttcagaaggtgcaggccttcagttgggcaaggtaactgtcctgggagttgctacagcaccgcagcaggtcttgtccaacggacggcccgtaagcaactttacctatagtcctgataccaaagttctggacatctgcgttgctctgctgatgggtgagcagttcctggtatcatggtgc

SEQ ID NO: 112 - protein, 944 aa, synthetic construct
  REGION 1..944: note = Variant of the Homo Sapiens Lysosomal alpha-glucosidase
MEWSWVFLFFLSVTTGVHSGHILWHDFSTVPRELSGSSQVLEETHPAHQVGASRPGPRDAQLHPGRPRAVPTQCDVPENSRFDCAPEKAITQEQCEARGCCYIPAKQGLQGAQMGQPWCFFPPSYPSYKLENLSQSEMGYTATLTRTTPSFFPKDILTLRLDVMMETENRLHFTIKDPANRRYEVPLETPHVHSRAPSPLYSVEFSEEPFGVIVRRQLDGRVLLNTTVAPLFFADQFLQLSTSLPSQYITGLAEHLSPLMLSTSWNKITLWNRDLAPTPGANLYGSHPFYLALEDGGSAHGVFLLNSNAMDVVLQPSPALSWRSTGGILDVYIFLGPEPKSVVQQYLDVVGYPFMPPYWGLGFHLCRWGYSSTAITRQVVENMTRAHFPLDVQWNDLDYMDSRRDFTFNKDGFRDFPAMVQELHQGGRRYMMIVDPGISSSGPAGSYRPYDEGLRRGVFITNETGQPLIGKVWPGSTAFPDFTNPEALAWWEDMVAEFHDQVPFDGMWIDMNEPSNFIRGSVDGCPNNELENPPYVPGVVGGTLQAATICASSHQFLSTHYNLHNLYGTTEAIASHRALVKARGTRPFVISRSTFAGHGRYAGHWTGDVWSSWEQLASSVPEILQFNLLGVPLVGADVCGFLGNTSEELCVRWTQLGAFYPFMRNHNSLTSLPQEPYSFSEPAQQAMRKALGLRYALLPHLYTLFHQAHVSGETVARPLFLEFPKDSSTWTVDHQMLWGEALLITPVLQPGKAEVTGYFPLGTWYDLQTVPVEALGSLPPPPAAPREPAIHSEGQWVTLPAPLDTINVHLREGYIIPLQGPGLTTTESRKQPMALAVALTKSGEARGELFWDDGESLEVLERGAYTQVIFEARNNTIVNELVHVTSEGAGLQLGKVTVLGVATAPQQVLSNGRPVSNFTYSPDTKVLDICVALLMGEQFLVSWC

SEQ ID NO: 113 - DNA, 2832 bp, synthetic construct
  misc_feature 1..2832: note = Variant of the Homo Sapiens Lysosomal alpha-glucosidase
  source 1..2832: mol_type = other DNA
atggaatggagctgggtctttctcttcttcctgtcagtaacgactggtgtccactccggacacattctgtatcatgatttttctaccgtgcctagagagctttccggttcaagtcaagtcctcgaagaaacacatccagcccatcaggttggcgcatctaggccgggccctcgggacgctcaactccacccagggagacctagggccgttcccactcagtgcgacgtgccagagaactcacgcttcgattgtgcacctgagaaggctatcacgcaagagcagtgcgaggcccgcggatgttgttacataccggctaaacaggggctgcagggtgcgcagatgggccaaccttggtgcttcttcccaccatcctatccgagttacaagctggagaatctctcccagtctgaaatgggatataccgcaacactgactcggaccaccccctccttctttcccaaagatatcttgactctgagacttgacgtaatgatggagacagaaaacaggctccactttaccattaaggaccctgccaatcgccgatacgaggtgcctctggaaacaccacacgtgcacagtagagctccatcacctctgtattctgtcgagttctccgaagagccgtttggcgttatcgtcaggaggcagctcgacgggcgagtgcttctgaacacgactgtggccccgttgttctttgcggatcagtttctgcaactgtcaacaagtctcccttctcagtacattaccgggcttgcagagcatctgtccccactcatgctgagtacttcatggaacaaaatcacactgtggaatagagaccttgctcctactccaggagccaacttgtatggttctcaccctttctacttggccctggaagatggcggatcagcgcatggcgtattcctcctgaattccaacgcaatggacgttgttcttcagccatctcctgctttgagttggagatctacaggcgggatactggacgtctacatctttctgggtccagagcctaaatccgtagtgcagcagtatcttgatgtcgtcggatacccgtttatgccaccatattggggcctggggttccacttgtgccgctggggatattcatccaccgccattacacgacaagttgttgagaatatgaccagggcacattttcctctggatgtacagtggaacgacctggactacatggatagtcgccgcgacttcaccttcaataaggatgggttcagagactttcctgctatggtccaagaacttcaccagggaggcaggaggtacatgatgatcgtagatccgggaatttcttcttctggcccagccggttcatacagaccgtatgacgaaggactgcgacgaggcgtctttatcacgaacgagactggtcagcctttgataggcaaggtttggccagggtccaccgctttcccggatttcacaaatcctgaggcactggcctggtgggaagatatggtcgccgagtttcacgaccaggtcccatttgacgggatgtggatcgacatgaacgagccatccaacttcattagaggaagtgtggatggctgtccgaataatgagctggaaaaccctccttacgtaccaggcgttgttggtgggactcttcaagctgcgacgatttgcgcatcctcccatcagttcctgtcaacccactataacttgcacaatctgtacgggacaacagaggctatcgccagtcatagggccctggtaaaagctagaggaacacgccctttcgttatctctcgctcaacttttgcaggccacggtaggtatgccggacattggaccggcgacgtctggagttcttgggaacagctggcttcctccgttccagagatattgcagtttaacctgttgggagtcccacttgtaggtgcagatgtttgtggcttcctggggaacacctcagaagaattgtgcgtaagatggactcaactgggcgccttctacccttttatgcgcaatcacaactcactgacatctttgcctcaagaaccgtactcatttagtgagccagcacagcaggccatgaggaaggctcttggcctgagatatgcacttctgccgcatctgtacacccttttccaccaggctcatgtccatggagagactgttgcacgacctctgttcttggagttcccaaaagactcttccacgtggacagtcgatcaccagatgctgtggggcgaggctctgctgattacacctgtattgcaacctggtaaggccgaagttaccgggtactttccattggggacctggtatgatctgcaaacagtcccggttgaagctcttggaagtcttccacctccacctgctgcaccaagggagcctgcgatccactctgaaggacagtgggtaactttgcctgcaccgctggacaccatcaatgtccatctgcgcgaaggctacatcataccacttcaaggtcctggactgaccactacagagtctagaaaacaaccaatggctcttgctgttgcactgactaaaagcggcgaagcaaggggtgagctgttctgggacgacggagagtcactggaggtactcgaacgaggcgcgtatacgcaggtcatttttgaggctcgcaataatacgatcgttaacgagctggtccacgtcacttcagaaggtgcaggccttcagttgggcaaggtaactgtcctgggagttgctacagcaccgcagcaggtcttgtccaacggacggcccgtaagcaactttacctatagtcctgataccaaagttctggacatctgcgttgctctgctgatgggtgagcagttcctggtatcatggtgc

SEQ ID NO: 114 - protein, 944 aa, synthetic construct
  REGION 1..944: note = Variant of the Homo Sapiens Lysosomal alpha-glucosidase
MEWSWVFLFFLSVTTGVHSGHILYHDFSTVPRELSGSSQVLEETHPAHQVGASRPGPRDAQLHPGRPRAVPTQCDVPENSRFDCAPEKAITQEQCEARGCCYIPAKQGLQGAQMGQPWCFFPPSYPSYKLENLSQSEMGYTATLTRTTPSFFPKDILTLRLDVMMETENRLHFTIKDPANRRYEVPLETPHVHSRAPSPLYSVEFSEEPFGVIVRRQLDGRVLLNTTVAPLFFADQFLQLSTSLPSQYITGLAEHLSPLMLSTSWNKITLWNRDLAPTPGANLYGSHPFYLALEDGGSAHGVFLLNSNAMDVVLQPSPALSWRSTGGILDVYIFLGPEPKSVVQQYLDVVGYPFMPPYWGLGFHLCRWGYSSTAITRQVVENMTRAHFPLDVQWNDLDYMDSRRDFTFNKDGFRDFPAMVQELHQGGRRYMMIVDPGISSSGPAGSYRPYDEGLRRGVFITNETGQPLIGKVWPGSTAFPDFTNPEALAWWEDMVAEFHDQVPFDGMWIDMNEPSNFIRGSVDGCPNNELENPPYVPGVVGGTLQAATICASSHQFLSTHYNLHNLYGTTEAIASHRALVKARGTRPFVISRSTFAGHGRYAGHWTGDVWSSWEQLASSVPEILQFNLLGVPLVGADVCGFLGNTSEELCVRWTQLGAFYPFMRNHNSLTSLPQEPYSFSEPAQQAMRKALGLRYALLPHLYTLFHQAHVHGETVARPLFLEFPKDSSTWTVDHQMLWGEALLITPVLQPGKAEVTGYFPLGTWYDLQTVPVEALGSLPPPPAAPREPAIHSEGQWVTLPAPLDTINVHLREGYIIPLQGPGLTTTESRKQPMALAVALTKSGEARGELFWDDGESLEVLERGAYTQVIFEARNNTIVNELVHVTSEGAGLQLGKVTVLGVATAPQQVLSNGRPVSNFTYSPDTKVLDICVALLMGEQFLVSWC

SEQ ID NO: 115 - DNA, 2832 bp, synthetic construct
  misc_feature 1..2832: note = Variant of the Homo Sapiens Lysosomal alpha-glucosidase
  source 1..2832: mol_type = other DNA
atggaatggagctgggtctttctcttcttcctgtcagtaacgactggtgtccactccggacacattctgtggcatgatttttctaccgtgcctagagagctttccggttcaagtcaagtcctcgaagaaacacatccagcccatcaggttggcgcatctaggccgggccctcgggacgctcaactccacccagggagacctagggccgttcccactcagtgcgacgtgccagagaactcacgcttcgattgtgcacctgggaaggctatcacgcaagagcagtgcgaggcccgcggatgttgttacataccggctaaacaggggctgcagggtgcgcagatgggccaaccttggtgcttcttcccaccatcctatccgagttacaagctggagaatctctcccagtctgaaatgggatataccgcaacactgactcggaccaccccctccttctttcccaaagatatcttgactctgagacttgacgtaatgatggagacagaaaacaggctccactttaccattaaggaccctgccaatcgccgatacgaggtgcctctggaaacaccacacgtgcacagtagagctccatcacctctgtattctgtcgagttctccgaagagccgtttggcgttatcgtcaggaggcagctcgacgggcgagtgcttctgaacacgactgtggccccgttgttctttgcggatcagtttctgcaactgtcaacaagtctcccttctcagtacattaccgggcttgcagagcatctgtccccactcatgctgagtacttcatggaacaaaatcacactgtggaatagagaccttgctcctactccaggagccaacttgtatggttctcaccctttctacttggccctggaagatggcggatcagcgcatggcgtattcctcctgaattccaacgcaatggacgttgttcttcagccatctcctgctttgagttggagatctacaggcgggatactggacgtctacatctttctgggtccagagcctaaatccgtagtgcagcagtatcttgatgtcgtcggatacccgtttatgccaccatattggggcctggggttccacttgtgccgctggggatattcatccaccgccattacacgacaagttgttgagaatatgaccagggcacattttcctctggatgtacagtggaacgacctggactacatggatagtcgccgcgacttcaccttcaataaggatgggttcagagactttcctgctatggtccaagaacttcaccagggaggcaggaggtacatgatgatcgtagatccgggaatttcttcttctggcccagccggttcatacagaccgtatgacgaaggactgcgacgaggcgtctttatcacgaacgagactggtcagcctttgataggcaaggtttggccagggtccaccgctttcccggatttcacaaatcctgaggcactggcctggtgggaagatatggtcgccgagtttcacgaccaggtcccatttgacgggatgtggatcgacatgaacgagccatccaacttcattagaggaagtgtggatggctgtccgaataatgagctggaaaaccctccttacgtaccaggcgttgttggtgggactcttcaagctgcgacgatttgcgcatcctcccatcagttcctgtcaacccactataacttgcacaatctgtacgggacaacagaggctatcgccagtcatagggccctggtaaaagctagaggaacacgccctttcgttatctctcgctcaacttttgcaggccacggtaggtatgccggacattggaccggcgacgtctggagttcttgggaacagctggcttcctccgttccagagatattgcagtttaacctgttgggagtcccacttgtaggtgcagatgtttgtggcttcctggggaacacctcagaagaattgtgcgtaagatggactcaactgggcgccttctacccttttatgcgcaatcacaactcactgacatctttgcctcaagaaccgtactcatttagtgagccagcacagcaggccatgaggaaggctcttggcctgagatatgcacttctgccgcatctgtacacccttttccaccaggctcatgtccatggagagactgttgcacgacctctgttcttggagttcccaaaagactcttccacgtggacagtcgatcaccagatgctgtggggcgaggctctgctgattacacctgtattgcaacctggtaaggccgaagttaccgggtactttccattggggacctggtatgatctgcaaacagtcccggttgaagctcttggaagtcttccacctccacctgctgcaccaagggagcctgcgatccactctgaaggacagtgggtaactttgcctgcaccgctggacaccatcaatgtccatctgcgcgaaggctacatcataccacttcaaggtcctggactgaccactacagagtctagaaaacaaccaatggctcttgctgttgcactgactaaaagcggcgaagcaaggggtgagctgttctgggacgacggagagtcactggaggtactcgaacgaggcgcgtatacgcaggtcatttttgaggctcgcaataatacgatcgttaacgagctggtccacgtcacttcagaaggtgcaggccttcagttgggcaaggtaactgtcctgggagttgctacagcaccgcagcaggtcttgtccaacggacggcccgtaagcaactttacctatagtcctgataccaaagttctggacatctgcgttgctctgctgatgggtgagcagttcctggtatcatggtgc

SEQ ID NO: 116 - protein, 944 aa, synthetic construct
  REGION 1..944: note = Variant of the Homo Sapiens Lysosomal alpha-glucosidase
MEWSWVFLFFLSVTTGVHSGHILWHDFSTVPRELSGSSQVLEETHPAHQVGASRPGPRDAQLHPGRPRAVPTQCDVPENSRFDCAPGKAITQEQCEARGCCYIPAKQGLQGAQMGQPWCFFPPSYPSYKLENLSQSEMGYTATLTRTTPSFFPKDILTLRLDVMMETENRLHFTIKDPANRRYEVPLETPHVHSRAPSPLYSVEFSEEPFGVIVRRQLDGRVLLNTTVAPLFFADQFLQLSTSLPSQYITGLAEHLSPLMLSTSWNKITLWNRDLAPTPGANLYGSHPFYLALEDGGSAHGVFLLNSNAMDVVLQPSPALSWRSTGGILDVYIFLGPEPKSVVQQYLDVVGYPFMPPYWGLGFHLCRWGYSSTAITRQVVENMTRAHFPLDVQWNDLDYMDSRRDFTFNKDGFRDFPAMVQELHQGGRRYMMIVDPGISSSGPAGSYRPYDEGLRRGVFITNETGQPLIGKVWPGSTAFPDFTNPEALAWWEDMVAEFHDQVPFDGMWIDMNEPSNFIRGSVDGCPNNELENPPYVPGVVGGTLQAATICASSHQFLSTHYNLHNLYGTTEAIASHRALVKARGTRPFVISRSTFAGHGRYAGHWTGDVWSSWEQLASSVPEILQFNLLGVPLVGADVCGFLGNTSEELCVRWTQLGAFYPFMRNHNSLTSLPQEPYSFSEPAQQAMRKALGLRYALLPHLYTLFHQAHVHGETVARPLFLEFPKDSSTWTVDHQMLWGEALLITPVLQPGKAEVTGYFPLGTWYDLQTVPVEALGSLPPPPAAPREPAIHSEGQWVTLPAPLDTINVHLREGYIIPLQGPGLTTTESRKQPMALAVALTKSGEARGELFWDDGESLEVLERGAYTQVIFEARNNTIVNELVHVTSEGAGLQLGKVTVLGVATAPQQVLSNGRPVSNFTYSPDTKVLDICVALLMGEQFLVSWC

SEQ ID NO: 117 - DNA, 2832 bp, synthetic construct
  misc_feature 1..2832: note = Variant of the Homo Sapiens Lysosomal alpha-glucosidase
  source 1..2832: mol_type = other DNA
atggaatggagctgggtctttctcttcttcctgtcagtaacgactggtgtccactccggacacattctgtggcatgatttttctaccgtgcctagagagctttccggttcaagtcaagtcctcgaagaaacacatccagcccatcaggttggcgcatctaggccgggccctcgggacgctcaactccacccagggagacctagggccgttcccactcagtgcgacgtgccaattaactcacgcttcgattgtgcacctgagaaggctatcacgcaagagcagtgcgaggcccgcggatgttgttacataccggctaaacaggggctgcagggtgcgcagatgggccaaccttggtgcttcttcccaccatcctatccgagttacaagctggagaatctctcccagtctgaaatgggatataccgcaacactgactcggaccaccccctccttctttcccaaagatatcttgactctgagacttgacgtaatgatggagacagaaaacaggctccactttaccattaaggaccctgccaatcgccgatacgaggtgcctctggaaacaccacacgtgcacagtagagctccatcacctctgtattctgtcgagttctccgaagagccgtttggcgttatcgtcaggaggcagctcgacgggcgagtgcttctgaacacgactgtggccccgttgttctttgcggatcagtttctgcaactgtcaacaagtctcccttctcagtacattaccgggcttgcagagcatctgtccccactcatgctgagtacttcatggaacaaaatcacactgtggaatagagaccttgctcctactccaggagccaacttgtatggttctcaccctttctacttggccctggaagatggcggatcagcgcatggcgtattcctcctgaattccaacgcaatggacgttgttcttcagccatctcctgctttgagttggagatctacaggcgggatactggacgtctacatctttctgggtccagagcctaaatccgtagtgcagcagtatcttgatgtcgtcggatacccgtttatgccaccatattggggcctggggttccacttgtgccgctggggatattcatccaccgccattacacgacaagttgttgagaatatgaccagggcacattttcctctggatgtacagtggaacgacctggactacatggatagtcgccgcgacttcaccttcaataaggatgggttcagagactttcctgctatggtccaagaacttcaccagggaggcaggaggtacatgatgatcgtagatccgggaatttcttcttctggcccagccggttcatacagaccgtatgacgaaggactgcgacgaggcgtctttatcacgaacgagactggtcagcctttgataggcaaggtttggccagggtccaccgctttcccggatttcacaaatcctgaggcactggcctggtgggaagatatggtcgccgagtttcacgaccaggtcccatttgacgggatgtggatcgacatgaacgagccatccaacttcattagaggaagtgtggatggctgtccgaataatgagctggaaaaccctccttacgtaccaggcgttgttggtgggactcttcaagctgcgacgatttgcgcatcctcccatcagttcctgtcaacccactataacttgcacaatctgtacgggacaacagaggctatcgccagtcatagggccctggtaaaagctagaggaacacgccctttcgttatctctcgctcaacttttgcaggccacggtaggtatgccggacattggaccggcgacgtctggagttcttgggaacagctggcttcctccgttccagagatattgcagtttaacctgttgggagtcccacttgtaggtgcagatgtttgtggcttcctggggaacacctcagaagaattgtgcgtaagatggactcaactgggcgccttctacccttttatgcgcaatcacaactcactgacatctttgcctcaagaaccgtactcatttagtgagccagcacagcaggccatgaggaaggctcttggcctgagatatgcacttctgccgcatctgtacacccttttccaccaggctcatgtccatggagagactgttgcacgacctctgttcttggagttcccaaaagactcttccacgtggacagtcgatcaccagatgctgtggggcgaggctctgctgattacacctgtattgcaacctggtaaggccgaagttaccgggtactttccattggggacctggtatgatctgcaaacagtcccggttgaagctcttggaagtcttccacctccacctgctgcaccaagggagcctgcgatccactctgaaggacagtgggtaactttgcctgcaccgctggacaccatcaatgtccatctgcgcgaaggctacatcataccacttcaaggtcctggactgaccactacagagtctagaaaacaaccaatggctcttgctgttgcactgactaaaagcggcgaagcaaggggtgagctgttctgggacgacggagagtcactggaggtactcgaacgaggcgcgtatacgcaggtcatttttgaggctcgcaataatacgatcgttaacgagctggtccacgtcacttcagaaggtgcaggccttcagttgggcaaggtaactgtcctgggagttgctacagcaccgcagcaggtcttgtccaacggacggcccgtaagcaactttacctatagtcctgataccaaagttctggacatctgcgttgctctgctgatgggtgagcagttcctggtatcatggtgc

SEQ ID NO: 118 - protein, 944 aa, synthetic construct
  REGION 1..944: note = Variant of the Homo Sapiens Lysosomal alpha-glucosidase
MEWSWVFLFFLSVTTGVHSGHILWHDFSTVPRELSGSSQVLEETHPAHQVGASRPGPRDAQLHPGRPRAVPTQCDVPINSRFDCAPEKAITQEQCEARGCCYIPAKQGLQGAQMGQPWCFFPPSYPSYKLENLSQSEMGYTATLTRTTPSFFPKDILTLRLDVMMETENRLHFTIKDPANRRYEVPLETPHVHSRAPSPLYSVEFSEEPFGVIVRRQLDGRVLLNTTVAPLFFADQFLQLSTSLPSQYITGLAEHLSPLMLSTSWNKITLWNRDLAPTPGANLYGSHPFYLALEDGGSAHGVFLLNSNAMDVVLQPSPALSWRSTGGILDVYIFLGPEPKSVVQQYLDVVGYPFMPPYWGLGFHLCRWGYSSTAITRQVVENMTRAHFPLDVQWNDLDYMDSRRDFTFNKDGFRDFPAMVQELHQGGRRYMMIVDPGISSSGPAGSYRPYDEGLRRGVFITNETGQPLIGKVWPGSTAFPDFTNPEALAWWEDMVAEFHDQVPFDGMWIDMNEPSNFIRGSVDGCPNNELENPPYVPGVVGGTLQAATICASSHQFLSTHYNLHNLYGTTEAIASHRALVKARGTRPFVISRSTFAGHGRYAGHWTGDVWSSWEQLASSVPEILQFNLLGVPLVGADVCGFLGNTSEELCVRWTQLGAFYPFMRNHNSLTSLPQEPYSFSEPAQQAMRKALGLRYALLPHLYTLFHQAHVHGETVARPLFLEFPKDSSTWTVDHQMLWGEALLITPVLQPGKAEVTGYFPLGTWYDLQTVPVEALGSLPPPPAAPREPAIHSEGQWVTLPAPLDTINVHLREGYIIPLQGPGLTTTESRKQPMALAVALTKSGEARGELFWDDGESLEVLERGAYTQVIFEARNNTIVNELVHVTSEGAGLQLGKVTVLGVATAPQQVLSNGRPVSNFTYSPDTKVLDICVALLMGEQFLVSWC

SEQ ID NO: 119 - DNA, 2832 bp, synthetic construct
  misc_feature 1..2832: note = Variant of the Homo Sapiens Lysosomal alpha-glucosidase
  source 1..2832: mol_type = other DNA
atggaatggagctgggtctttctcttcttcctgtcagtaacgactggtgtccactccggacacattctgtggcatgatttttctaccgtgcctagagagctttccggttcaagtcaagtcctcgaagaaacacatccagcccatcaggttggcgcatctaggccgggccctcgggacgctcaactccacccagggagacctagggccgttcccactcagtgcgacgtgccagagaactcacgcttcgattgtgcacctgagaaggctatcacgcaagagcagtgcgaggcccgcggatgttgttacataccggctaaacaggggctgcagggtgcgcagatgggccaaccttggtgcttcttcccaccatcctatccgagttacaagctggagaatctctcccagtctgaaatgggatataccgcaacactgactcggaccaccccctccttctttcccaaagatatcttgactctgagacttgacgtaatgatggagacagaaaacaggctccactttaccattaaggaccctgccaatcgccgatacgaggtgcctctggaaacaccacacgtgcacagtagagctccatcacctctgtattctgtcgagttctccgaagagccgtttggcgttatcgtcaggaggcagctcgacgggcgagtgcttctgaacacgactgtggccccgttgttctttgcggatcagtttctgcaactgtcaacaagtctcccttctcagtacattaccgggcttgcagagcatctgtccccactcatgctgagtacttcatggaacaaaatcacactgtggaatagagaccttgctcctactccaggagccaacttgtatggttctcaccctttctacttggccctggaagatggcggatcagcgcatggcgtattcctcctgaattccaacgcaatggacgttgttcttcagccatctcctgctttgagttggagatctacaggcgggatactggacgtctacatctttctgggtccagagcctaaatccgtagtgcagcagtatcttgatgtcgtcggatacccgtttatgccaccatattggggcctggggttccacttgtgccgctggggatattcatccaccgccattacacgacaagttgttgagaatatgaccagggcacattttcctctggatgtacagtggaacgacctggactacatggatagtcgccgcgacttcaccttcaataaggatgggttcagagactttcctgctatggtccaagaacttcaccagggaggcaggaggtacatgatgatcgtagatccgggaatttcttcttctggcccagccggttcatacagaccgtatgacgaaggactgcgacgaggcgtctttatcacgaacgagactggtcagcctttgataggcaaggtttggccagggtccaccgctttcccggatttcacaaatcctgaggcactggcctggtgggaagatatggtcgccgagtttcacgaccaggtcccatttgacgggatgtggatcgacatgaacgagccatccaacttcattagaggaagtgtggatggctgtccgaataatgagctggaaaaccctccttacgtaccaggcgttgttggtgggactcttcaagctgcgacgatttgcgcatcctcccatcagttcctgtcaacccactataacttgcacaatctgtacgggacaacagaggctatcgccagtcatagggccctggtaaaagctagaggaacacgccctttcgttatctctcgctcaacttttgcaggccacggtaggtatgccggacattggaccggcgacgtctggagttcttgggaacagctggcttcctccgttccagagatattgcagtttaacctgttgggagtcccacttgtaggtgcagatgtttgtggcttcctggggaacacctcagaagaattgtgcgtaagatggactcaactgggcgccttctacccttttatgcgcaatcacaactcactgacatctttgcctcaagaaccgtactcatttagtgagccagcacagcaggccatgaggaaggctcttggcctgagatatgcacttctgccgcatctgtacacccttttccaccaggctcatgtccatggagagactgttgcacgacctctgttcttggagttcccaaaagactcttccacgtggacagtcgatcaccagatgctgtggggcgaggctctgctgattacacctgtattgcaacctggtaaggccgaagttaccgggtactttccattggggacctggtatgatctgcaaacagtcccggttgaagctcttggaagtcttccacctccacctgctgcaccaagggagcctgcgatccactctgaaggacagtgggtaactttgcctgcaccgctggacaccatcaatgtccatctgcgcgaaggctacatcataccacttcaaggtcctggactgaccactacagagtctagaaaacaaccaatggctcttgctgttgcactgactaaaagcggcgaagcaaggggtgagctgttctgggacgacggagagtcactggaggtactcgaacgaggcgcgtatacgcaggtcatttttctggctcgcaataatacgatcgttaacgagctggtccacgtcacttcagaaggtgcaggccttcagttgggcaaggtaactgtcctgggagttgctacagcaccgcagcaggtcttgtccaacggacggcccgtaagcaactttacctatagtcctgataccaaagttctggacatctgcgttgctctgctgatgggtgagcagttcctggtatcatggtgc

SEQ ID NO: 120 - protein, 944 aa, synthetic construct
  REGION 1..944: note = Variant of the Homo Sapiens Lysosomal alpha-glucosidase
MEWSWVFLFFLSVTTGVHSGHILWHDFSTVPRELSGSSQVLEETHPAHQVGASRPGPRDAQLHPGRPRAVPTQCDVPENSRFDCAPEKAITQEQCEARGCCYIPAKQGLQGAQMGQPWCFFPPSYPSYKLENLSQSEMGYTATLTRTTPSFFPKDILTLRLDVMMETENRLHFTIKDPANRRYEVPLETPHVHSRAPSPLYSVEFSEEPFGVIVRRQLDGRVLLNTTVAPLFFADQFLQLSTSLPSQYITGLAEHLSPLMLSTSWNKITLWNRDLAPTPGANLYGSHPFYLALEDGGSAHGVFLLNSNAMDVVLQPSPALSWRSTGGILDVYIFLGPEPKSVVQQYLDVVGYPFMPPYWGLGFHLCRWGYSSTAITRQVVENMTRAHFPLDVQWNDLDYMDSRRDFTFNKDGFRDFPAMVQELHQGGRRYMMIVDPGISSSGPAGSYRPYDEGLRRGVFITNETGQPLIGKVWPGSTAFPDFTNPEALAWWEDMVAEFHDQVPFDGMWIDMNEPSNFIRGSVDGCPNNELENPPYVPGVVGGTLQAATICASSHQFLSTHYNLHNLYGTTEAIASHRALVKARGTRPFVISRSTFAGHGRYAGHWTGDVWSSWEQLASSVPEILQFNLLGVPLVGADVCGFLGNTSEELCVRWTQLGAFYPFMRNHNSLTSLPQEPYSFSEPAQQAMRKALGLRYALLPHLYTLFHQAHVHGETVARPLFLEFPKDSSTWTVDHQMLWGEALLITPVLQPGKAEVTGYFPLGTWYDLQTVPVEALGSLPPPPAAPREPAIHSEGQWVTLPAPLDTINVHLREGYIIPLQGPGLTTTESRKQPMALAVALTKSGEARGELFWDDGESLEVLERGAYTQVIFLARNNTIVNELVHVTSEGAGLQLGKVTVLGVATAPQQVLSNGRPVSNFTYSPDTKVLDICVALLMGEQFLVSWC

SEQ ID NO: 121 - DNA, 2832 bp, synthetic construct
  misc_feature 1..2832: note = Variant of the Homo Sapiens Lysosomal alpha-glucosidase
  source 1..2832: mol_type = other DNA
atggaatggagctgggtctttctcttcttcctgtcagtaacgactggtgtccactccggacacattctgtggcatgatttttctaccgtgcctagagagctttccggttcaagtcaagtcctcgaagaaacacatccagcccatcaggttggcgcatctaggccgggccctcgggacgctcaactccacccagggagacctagggccgttcccactcagtgcgacgtgccacgtaactcacgcttcgattgtgcacctgagaaggctatcacgcaagagcagtgcgaggcccgcggatgttgttacataccggctaaacaggggctgcagggtgcgcagatgggccaaccttggtgcttcttcccaccatcctatccgagttacaagctggagaatctctcccagtctgaaatgggatataccgcaacactgactcggaccaccccctccttctttcccaaagatatcttgactctgagacttgacgtaatgatggagacagaaaacaggctccactttaccattaaggaccctgccaatcgccgatacgaggtgcctctggaaacaccacacgtgcacagtagagctccatcacctctgtattctgtcgagttctccgaagagccgtttggcgttatcgtcaggaggcagctcgacgggcgagtgcttctgaacacgactgtggccccgttgttctttgcggatcagtttctgcaactgtcaacaagtctcccttctcagtacattaccgggcttgcagagcatctgtccccactcatgctgagtacttcatggaacaaaatcacactgtggaatagagaccttgctcctactccaggagccaacttgtatggttctcaccctttctacttggccctggaagatggcggatcagcgcatggcgtattcctcctgaattccaacgcaatggacgttgttcttcagccatctcctgctttgagttggagatctacaggcgggatactggacgtctacatctttctgggtccagagcctaaatccgtagtgcagcagtatcttgatgtcgtcggatacccgtttatgccaccatattggggcctggggttccacttgtgccgctggggatattcatccaccgccattacacgacaagttgttgagaatatgaccagggcacattttcctctggatgtacagtggaacgacctggactacatggatagtcgccgcgacttcaccttcaataaggatgggttcagagactttcctgctatggtccaagaacttcaccagggaggcaggaggtacatgatgatcgtagatccgggaatttcttcttctggcccagccggttcatacagaccgtatgacgaaggactgcgacgaggcgtctttatcacgaacgagactggtcagcctttgataggcaaggtttggccagggtccaccgctttcccggatttcacaaatcctgaggcactggcctggtgggaagatatggtcgccgagtttcacgaccaggtcccatttgacgggatgtggatcgacatgaacgagccatccaacttcattagaggaagtgtggatggctgtccgaataatgagctggaaaaccctccttacgtaccaggcgttgttggtgggactcttcaagctgcgacgatttgcgcatcctcccatcagttcctgtcaacccactataacttgcacaatctgtacgggacaacagaggctatcgccagtcatagggccctggtaaaagctagaggaacacgccctttcgttatctctcgctcaacttttgcaggccacggtaggtatgccggacattggaccggcgacgtctggagttcttgggaacagctggcttcctccgttccagagatattgcagtttaacctgttgggagtcccacttgtaggtgcagatgtttgtggcttcctggggaacacctcagaagaattgtgcgtaagatggactcaactgggcgccttctacccttttatgcgcaatcacaactcactgacatctttgcctcaagaaccgtactcatttagtgagccagcacagcaggccatgaggaaggctcttggcctgagatatgcacttctgccgcatctgtacacccttttccaccaggctcatgtccatggagagactgttgcacgacctctgttcttggagttcccaaaagactcttccacgtggacagtcgatcaccagatgctgtggggcgaggctctgctgattacacctgtattgcaacctggtaaggccgaagttaccgggtactttccattggggacctggtatgatctgcaaacagtcccggttgaagctcttggaagtcttccacctccacctgctgcaccaagggagcctgcgatccactctgaaggacagtgggtaactttgcctgcaccgctggacaccatcaatgtccatctgcgcgaaggctacatcataccacttcaaggtcctggactgaccactacagagtctagaaaacaaccaatggctcttgctgttgcactgactaaaagcggcgaagcaaggggtgagctgttctgggacgacggagagtcactggaggtactcgaacgaggcgcgtatacgcaggtcatttttgaggctcgcaataatacgatcgttaacgagctggtccacgtcacttcagaaggtgcaggccttcagttgggcaaggtaactgtcctgggagttgctacagcaccgcagcaggtcttgtccaacggacggcccgtaagcaactttacctatagtcctgataccaaagttctggacatctgcgttgctctgctgatgggtgagcagttcctggtatcatggtgc

SEQ ID NO: 122 - protein, 944 aa, synthetic construct
  REGION 1..944: note = Variant of the Homo Sapiens Lysosomal alpha-glucosidase
MEWSWVFLFFLSVTTGVHSGHILWHDFSTVPRELSGSSQVLEETHPAHQVGASRPGPRDAQLHPGRPRAVPTQCDVPRNSRFDCAPEKAITQEQCEARGCCYIPAKQGLQGAQMGQPWCFFPPSYPSYKLENLSQSEMGYTATLTRTTPSFFPKDILTLRLDVMMETENRLHFTIKDPANRRYEVPLETPHVHSRAPSPLYSVEFSEEPFGVIVRRQLDGRVLLNTTVAPLFFADQFLQLSTSLPSQYITGLAEHLSPLMLSTSWNKITLWNRDLAPTPGANLYGSHPFYLALEDGGSAHGVFLLNSNAMDVVLQPSPALSWRSTGGILDVYIFLGPEPKSVVQQYLDVVGYPFMPPYWGLGFHLCRWGYSSTAITRQVVENMTRAHFPLDVQWNDLDYMDSRRDFTFNKDGFRDFPAMVQELHQGGRRYMMIVDPGISSSGPAGSYRPYDEGLRRGVFITNETGQPLIGKVWPGSTAFPDFTNPEALAWWEDMVAEFHDQVPFDGMWIDMNEPSNFIRGSVDGCPNNELENPPYVPGVVGGTLQAATICASSHQFLSTHYNLHNLYGTTEAIASHRALVKARGTRPFVISRSTFAGHGRYAGHWTGDVWSSWEQLASSVPEILQFNLLGVPLVGADVCGFLGNTSEELCVRWTQLGAFYPFMRNHNSLTSLPQEPYSFSEPAQQAMRKALGLRYALLPHLYTLFHQAHVHGETVARPLFLEFPKDSSTWTVDHQMLWGEALLITPVLQPGKAEVTGYFPLGTWYDLQTVPVEALGSLPPPPAAPREPAIHSEGQWVTLPAPLDTINVHLREGYIIPLQGPGLTTTESRKQPMALAVALTKSGEARGELFWDDGESLEVLERGAYTQVIFEARNNTIVNELVHVTSEGAGLQLGKVTVLGVATAPQQVLSNGRPVSNFTYSPDTKVLDICVALLMGEQFLVSWC

SEQ ID NO: 123 - DNA, 2832 bp, synthetic construct
  misc_feature 1..2832: note = Variant of the Homo Sapiens Lysosomal alpha-glucosidase
  source 1..2832: mol_type = other DNA
atggaatggagctgggtctttctcttcttcctgtcagtaacgactggtgtccactccggacacattctgtggcatgatttttctaccgtgcctagagagctttccggttcaagtcaagtcctcgaagaaacacatccagcccatcaggttggcgcatctaggccgggccctcgggacgctcaactccacccagggagacctagggccgttcccactcagtgcgacgtgccagagaactcacgcttcgattgtgcacctgagaaggctatcacgcaagagcagtgcgaggcccgcggatgttgttacataccggctaaacaggggctgcagggtgcgcagatgggccaaccttggtgcttcttcccaccatcctatccgagttacaagctggagaatctctcccagtctgaaatgggatataccgcaacactgactcggaccaccccctccttctttcccaaagatatcttgactctgagacttgacgtaatgatggagacagaaaacaggctccactttaccattaaggaccctgccaatcgccgatacgaggtgcctctggaaacaccacacgtgcacagtagagctccatcacctctgtattctgtcgagttctccgaagagccgtttggcgttatcgtcaggaggcagctcgacgggcgagtgcttctgaacacgactgtggccccgttgttctttgcggatcagtttctgcaactgtcaacaagtctcccttctcagtacattaccgggcttgcagagcatctgtccccactcatgctgagtacttcatggaacaaaatcacactgtggaatagagaccttgctcctactccaggagccaacttgtatggttctcaccctttctacttggccctggaagatggcggatcagcgcatggcgtattcctcctgaattccaacgcaatggacgttgttcttcagccatctcctgctttgagttggagatctacaggcgggatactggacgtctacatctttctgggtccagagcctaaatccgtagtgcagcagtatcttgatgtcgtcggatacccgtttatgccaccatattggggcctggggttccacttgtgccgctggggatattcatccaccgccattacacgacaagttgttgagaatatgaccagggcacattttcctctggatgtacagtggaacgacctggactacatggatagtcgccgcgacttcaccttcaataaggatgggttcagagactttcctgctatggtccaagaacttcaccagggaggcaggaggtacatgatgatcgtagatccgggaatttcttcttctggcccagccggttcatacagaccgtatgacgaaggactgcgacgaggcgtctttatcacgaacgagactggtcagcctttgataggcaaggtttggccagggtccaccgctttcccggatttcacaaatcctgaggcactggcctggtgggaagatatggtcgccgagtttcacgaccaggtcccatttgacgggatgtggatcgacatgaacgagccatccaacttcattagaggaagtgtggatggctgtccgaataatgagctggaaaaccctccttacgtaccaggcgttgttggtgggactcttcaagctgcgacgatttgcgcatcctcccatcagttcctgtcaacccactataacttgcacaatctgtacgggctgacagaggctatcgccagtcatagggccctggtaaaagctagaggaacacgccctttcgttatctctcgctcaacttttgcaggccacggtaggtatgccggacattggaccggcgacgtctggagttcttgggaacagctggcttcctccgttccagagatattgcagtttaacctgttgggagtcccacttgtaggtgcagatgtttgtggcttcctggggaacacctcagaagaattgtgcgtaagatggactcaactgggcgccttctacccttttatgcgcaatcacaactcactgacatctttgcctcaagaaccgtactcatttagtgagccagcacagcaggccatgaggaaggctcttggcctgagatatgcacttctgccgcatctgtacacccttttccaccaggctcatgtccatggagagactgttgcacgacctctgttcttggagttcccaaaagactcttccacgtggacagtcgatcaccagatgctgtggggcgaggctctgctgattacacctgtattgcaacctggtaaggccgaagttaccgggtactttccattggggacctggtatgatctgcaaacagtcccggttgaagctcttggaagtcttccacctccacctgctgcaccaagggagcctgcgatccactctgaaggacagtgggtaactttgcctgcaccgctggacaccatcaatgtccatctgcgcgaaggctacatcataccacttcaaggtcctggactgaccactacagagtctagaaaacaaccaatggctcttgctgttgcactgactaaaagcggcgaagcaaggggtgagctgttctgggacgacggagagtcactggaggtactcgaacgaggcgcgtatacgcaggtcatttttgaggctcgcaataatacgatcgttaacgagctggtccacgtcacttcagaaggtgcaggccttcagttgggcaaggtaactgtcctgggagttgctacagcaccgcagcaggtcttgtccaacggacggcccgtaagcaactttacctatagtcctgataccaaagttctggacatctgcgttgctctgctgatgggtgagcagttcctggtatcatggtgc

SEQ ID NO: 124 - protein, 944 aa, synthetic construct
  REGION 1..944: note = Variant of the Homo Sapiens Lysosomal alpha-glucosidase
MEWSWVFLFFLSVTTGVHSGHILWHDFSTVPRELSGSSQVLEETHPAHQVGASRPGPRDAQLHPGRPRAVPTQCDVPENSRFDCAPEKAITQEQCEARGCCYIPAKQGLQGAQMGQPWCFFPPSYPSYKLENLSQSEMGYTATLTRTTPSFFPKDILTLRLDVMMETENRLHFTIKDPANRRYEVPLETPHVHSRAPSPLYSVEFSEEPFGVIVRRQLDGRVLLNTTVAPLFFADQFLQLSTSLPSQYITGLAEHLSPLMLSTSWNKITLWNRDLAPTPGANLYGSHPFYLALEDGGSAHGVFLLNSNAMDVVLQPSPALSWRSTGGILDVYIFLGPEPKSVVQQYLDVVGYPFMPPYWGLGFHLCRWGYSSTAITRQVVENMTRAHFPLDVQWNDLDYMDSRRDFTFNKDGFRDFPAMVQELHQGGRRYMMIVDPGISSSGPAGSYRPYDEGLRRGVFITNETGQPLIGKVWPGSTAFPDFTNPEALAWWEDMVAEFHDQVPFDGMWIDMNEPSNFIRGSVDGCPNNELENPPYVPGVVGGTLQAATICASSHQFLSTHYNLHNLYGLTEAIASHRALVKARGTRPFVISRSTFAGHGRYAGHWTGDVWSSWEQLASSVPEILQFNLLGVPLVGADVCGFLGNTSEELCVRWTQLGAFYPFMRNHNSLTSLPQEPYSFSEPAQQAMRKALGLRYALLPHLYTLFHQAHVHGETVARPLFLEFPKDSSTWTVDHQMLWGEALLITPVLQPGKAEVTGYFPLGTWYDLQTVPVEALGSLPPPPAAPREPAIHSEGQWVTLPAPLDTINVHLREGYIIPLQGPGLTTTESRKQPMALAVALTKSGEARGELFWDDGESLEVLERGAYTQVIFEARNNTIVNELVHVTSEGAGLQLGKVTVLGVATAPQQVLSNGRPVSNFTYSPDTKVLDICVALLMGEQFLVSWC

SEQ ID NO: 125 - DNA, 2832 bp, synthetic construct
  misc_feature 1..2832: note = Variant of the Homo Sapiens Lysosomal alpha-glucosidase
  source 1..2832: mol_type = other DNA
atggaatggagctgggtctttctcttcttcctgtcagtaacgactggtgtccactccggacacattctgtgtcatgatttttctaccgtgcctagagagctttccggttcaagtcaagtcctcgaagaaacacatccagcccatcaggttggcgcatctaggccgggccctcgggacgctcaactccacccagggagacctagggccgttcccactcagtgcgacgtgccagagaactcacgcttcgattgtgcacctgagaaggctatcacgcaagagcagtgcgaggcccgcggatgttgttacataccggctaaacaggggctgcagggtgcgcagatgggccaaccttggtgcttcttcccaccatcctatccgagttacaagctggagaatctctcccagtctgaaatgggatataccgcaacactgactcggaccaccccctccttctttcccaaagatatcttgactctgagacttgacgtaatgatggagacagaaaacaggctccactttaccattaaggaccctgccaatcgccgatacgaggtgcctctggaaacaccacacgtgcacagtagagctccatcacctctgtattctgtcgagttctccgaagagccgtttggcgttatcgtcaggaggcagctcgacgggcgagtgcttctgaacacgactgtggccccgttgttctttgcggatcagtttctgcaactgtcaacaagtctcccttctcagtacattaccgggcttgcagagcatctgtccccactcatgctgagtacttcatggaacaaaatcacactgtggaatagagaccttgctcctactccaggagccaacttgtatggttctcaccctttctacttggccctggaagatggcggatcagcgcatggcgtattcctcctgaattccaacgcaatggacgttgttcttcagccatctcctgctttgagttggagatctacaggcgggatactggacgtctacatctttctgggtccagagcctaaatccgtagtgcagcagtatcttgatgtcgtcggatacccgtttatgccaccatattggggcctggggttccacttgtgccgctggggatattcatccaccgccattacacgacaagttgttgagaatatgaccagggcacattttcctctggatgtacagtggaacgacctggactacatggatagtcgccgcgacttcaccttcaataaggatgggttcagagactttcctgctatggtccaagaacttcaccagggaggcaggaggtacatgatgatcgtagatccgggaatttcttcttctggcccagccggttcatacagaccgtatgacgaaggactgcgacgaggcgtctttatcacgaacgagactggtcagcctttgataggcaaggtttggccagggtccaccgctttcccggatttcacaaatcctgaggcactggcctggtgggaagatatggtcgccgagtttcacgaccaggtcccatttgacgggatgtggatcgacatgaacgagccatccaacttcattagaggaagtgtggatggctgtccgaataatgagctggaaaaccctccttacgtaccaggcgttgttggtgggactcttcaagctgcgacgatttgcgcatcctcccatcagttcctgtcaacccactataacttgcacaatctgtacgggacaacagaggctatcgccagtcatagggccctggtaaaagctagaggaacacgccctttcgttatctctcgctcaacttttgcaggccacggtaggtatgccggacattggaccggcgacgtctggagttcttgggaacagctggcttcctccgttccagagatattgcagtttaacctgttgggagtcccacttgtaggtgcagatgtttgtggcttcctggggaacacctcagaagaattgtgcgtaagatggactcaactgggcgccttctacccttttatgcgcaatcacaactcactgacatctttgcctcaagaaccgtactcatttagtgagccagcacagcaggccatgaggaaggctcttggcctgagatatgcacttctgccgcatctgtacacccttttccaccaggctcatgtccatggagagactgttgcacgacctctgttcttggagttcccaaaagactcttccacgtggacagtcgatcaccagatgctgtggggcgaggctctgctgattacacctgtattgcaacctggtaaggccgaagttaccgggtactttccattggggacctggtatgatctgcaaacagtcccggttgaagctcttggaagtcttccacctccacctgctgcaccaagggagcctgcgatccactctgaaggacagtgggtaactttgcctgcaccgctggacaccatcaatgtccatctgcgcgaaggctacatcataccacttcaaggtcctggactgaccactacagagtctagaaaacaaccaatggctcttgctgttgcactgactaaaagcggcgaagcaaggggtgagctgttctgggacgacggagagtcactggaggtactcgaacgaggcgcgtatacgcaggtcatttttgaggctcgcaataatacgatcgttaacgagctggtccacgtcacttcagaaggtgcaggccttcagttgggcaaggtaactgtcctgggagttgctacagcaccgcagcaggtcttgtccaacggacggcccgtaagcaactttacctatagtcctgataccaaagttctggacatctgcgttgctctgctgatgggtgagcagttcctggtatcatggtgc

SEQ ID NO: 126 - protein, 944 aa, synthetic construct
  REGION 1..944: note = Variant of the Homo Sapiens Lysosomal alpha-glucosidase
MEWSWVFLFFLSVTTGVHSGHILCHDFSTVPRELSGSSQVLEETHPAHQVGASRPGPRDAQLHPGRPRAVPTQCDVPENSRFDCAPEKAITQEQCEARGCCYIPAKQGLQGAQMGQPWCFFPPSYPSYKLENLSQSEMGYTATLTRTTPSFFPKDILTLRLDVMMETENRLHFTIKDPANRRYEVPLETPHVHSRAPSPLYSVEFSEEPFGVIVRRQLDGRVLLNTTVAPLFFADQFLQLSTSLPSQYITGLAEHLSPLMLSTSWNKITLWNRDLAPTPGANLYGSHPFYLALEDGGSAHGVFLLNSNAMDVVLQPSPALSWRSTGGILDVYIFLGPEPKSVVQQYLDVVGYPFMPPYWGLGFHLCRWGYSSTAITRQVVENMTRAHFPLDVQWNDLDYMDSRRDFTFNKDGFRDFPAMVQELHQGGRRYMMIVDPGISSSGPAGSYRPYDEGLRRGVFITNETGQPLIGKVWPGSTAFPDFTNPEALAWWEDMVAEFHDQVPFDGMWIDMNEPSNFIRGSVDGCPNNELENPPYVPGVVGGTLQAATICASSHQFLSTHYNLHNLYGTTEAIASHRALVKARGTRPFVISRSTFAGHGRYAGHWTGDVWSSWEQLASSVPEILQFNLLGVPLVGADVCGFLGNTSEELCVRWTQLGAFYPFMRNHNSLTSLPQEPYSFSEPAQQAMRKALGLRYALLPHLYTLFHQAHVHGETVARPLFLEFPKDSSTWTVDHQMLWGEALLITPVLQPGKAEVTGYFPLGTWYDLQTVPVEALGSLPPPPAAPREPAIHSEGQWVTLPAPLDTINVHLREGYIIPLQGPGLTTTESRKQPMALAVALTKSGEARGELFWDDGESLEVLERGAYTQVIFEARNNTIVNELVHVTSEGAGLQLGKVTVLGVATAPQQVLSNGRPVSNFTYSPDTKVLDICVALLMGEQFLVSWC

SEQ ID NO: 127 - DNA, 2832 bp, synthetic construct
  misc_feature 1..2832: note = Variant of the Homo Sapiens Lysosomal alpha-glucosidase
  source 1..2832: mol_type = other DNA
atggaatggagctgggtctttctcttcttcctgtcagtaacgactggtgtccactccggacacattctgtggcatgatttttctaccgtgcctagagagctttccggttcaagtcaagtcctcgaagaaacacatccagcccatcaggttggcgcatctaggccgggccctcgggacgctcaactccacccagggagacctagggccgttcccactcagtgcgacgtgccagagaactcacgcttcgattgtgcacctgagaaggctatcacgcaagagcagtgcgaggcccgcggatgttgttacataccggctaaacaggggctgcagggtgcgcagatgggccaaccttggtgcttcttcccaccatcctatccgagttacaagctggagaatctctcccagtctgaaatgggatataccgcaacactgactcggaccaccccctccttctttcccaaagatatcttgactctgagacttgacgtaatgatggagacagaaaacaggctccactttaccattaaggaccctgccaatcgccgatacgaggtgcctctggaaacaccacacgtgcacagtagagctccatcacctctgtattctgtcgagttctccgaagagccgtttggcgttatcgtcaggaggcagctcgacgggcgagtgcttctgaacacgactgtggccccgttgttctttgcggatcagtttctgcaactgtcaacaagtctcccttctcagtacattaccgggcttgcagagcatctgtccccactcatgctgagtacttcatggaacaaaatcacactgtggaatagagaccttgctcctactccaggagccaacttgtatggttctcaccctttctacttggccctggaagatggcggatcagcgcatggcgtattcctcctgaattccaacgcaatggacgttgttcttcagccatctcctgctttgagttggagatctacaggcgggatactggacgtctacatctttctgggtccagagcctaaatccgtagtgcagcagtatcttgatgtcgtcggatacccgtttatgccaccatattggggcctggggttccacttgtgccgctggggatattcatccaccgccattacacgacaagttgttgagaatatgaccagggcacattttcctctggatgtacagtggaacgacctggactacatggatagtcgccgcgacttcaccttcaataaggatgggttcagagactttcctgctatggtccaagaacttcaccagggaggcaggaggtacatgatgatcgtagatccgggaatttcttcttctggcccagccggttcatacagaccgtatgacgaaggactgcgacgaggcgtctttatcacgaacgagactggtcagcctttgataggcaaggtttggccagggtccaccgctttcccggatttcacaaatcctgaggcactggcctggtgggaagatatggtcgccgagtttcacgaccaggtcccatttgacgggatgtggatcgacatgaacgagccatccaacttcattagaggaagtgtggatggctgtccgaataatgagctggaaaaccctccttacgtaccaggcgttgttggtgggactcttcaagctgcgacgatttgcgcatcctcccatcagttcctgtcaacccactataacttgcacaatctgtacgggacaacagaggctatcgccagtcatagggccctggtaaaagctagaggaacacgccctttcgttatctctcgctcaacttttgcaggccacggtaggtatgccggacattggaccggcgacgtctggagttcttgggaacagctggcttcctccgttccagagatattgcagtttaacctgttgggagtcccacttgtaggtgcagatgtttgtggcttcctggggaacacctcagaagaattgtgcgtaagatggactcaactgggcgccttctacccttttatgcgcaatcacaactcactgttgtctttgcctcaagaaccgtactcatttagtgagccagcacagcaggccatgaggaaggctcttggcctgagatatgcacttctgccgcatctgtacacccttttccaccaggctcatgtccatggagagactgttgcacgacctctgttcttggagttcccaaaagactcttccacgtggacagtcgatcaccagatgctgtggggcgaggctctgctgattacacctgtattgcaacctggtaaggccgaagttaccgggtactttccattggggacctggtatgatctgcaaacagtcccggttgaagctcttggaagtcttccacctccacctgctgcaccaagggagcctgcgatccactctgaaggacagtgggtaactttgcctgcaccgctggacaccatcaatgtccatctgcgcgaaggctacatcataccacttcaaggtcctggactgaccactacagagtctagaaaacaaccaatggctcttgctgttgcactgactaaaagcggcgaagcaaggggtgagctgttctgggacgacggagagtcactggaggtactcgaacgaggcgcgtatacgcaggtcatttttgaggctcgcaataatacgatcgttaacgagctggtccacgtcacttcagaaggtgcaggccttcagttgggcaaggtaactgtcctgggagttgctacagcaccgcagcaggtcttgtccaacggacggcccgtaagcaactttacctatagtcctgataccaaagttctggacatctgcgttgctctgctgatgggtgagcagttcctggtatcatggtgc

SEQ ID NO: 128 - protein, 944 aa, synthetic construct
  REGION 1..944: note = Variant of the Homo Sapiens Lysosomal alpha-glucosidase
MEWSWVFLFFLSVTTGVHSGHILWHDFSTVPRELSGSSQVLEETHPAHQVGASRPGPRDAQLHPGRPRAVPTQCDVPENSRFDCAPEKAITQEQCEARGCCYIPAKQGLQGAQMGQPWCFFPPSYPSYKLENLSQSEMGYTATLTRTTPSFFPKDILTLRLDVMMETENRLHFTIKDPANRRYEVPLETPHVHSRAPSPLYSVEFSEEPFGVIVRRQLDGRVLLNTTVAPLFFADQFLQLSTSLPSQYITGLAEHLSPLMLSTSWNKITLWNRDLAPTPGANLYGSHPFYLALEDGGSAHGVFLLNSNAMDVVLQPSPALSWRSTGGILDVYIFLGPEPKSVVQQYLDVVGYPFMPPYWGLGFHLCRWGYSSTAITRQVVENMTRAHFPLDVQWNDLDYMDSRRDFTFNKDGFRDFPAMVQELHQGGRRYMMIVDPGISSSGPAGSYRPYDEGLRRGVFITNETGQPLIGKVWPGSTAFPDFTNPEALAWWEDMVAEFHDQVPFDGMWIDMNEPSNFIRGSVDGCPNNELENPPYVPGVVGGTLQAATICASSHQFLSTHYNLHNLYGTTEAIASHRALVKARGTRPFVISRSTFAGHGRYAGHWTGDVWSSWEQLASSVPEILQFNLLGVPLVGADVCGFLGNTSEELCVRWTQLGAFYPFMRNHNSLLSLPQEPYSFSEPAQQAMRKALGLRYALLPHLYTLFHQAHVHGETVARPLFLEFPKDSSTWTVDHQMLWGEALLITPVLQPGKAEVTGYFPLGTWYDLQTVPVEALGSLPPPPAAPREPAIHSEGQWVTLPAPLDTINVHLREGYIIPLQGPGLTTTESRKQPMALAVALTKSGEARGELFWDDGESLEVLERGAYTQVIFEARNNTIVNELVHVTSEGAGLQLGKVTVLGVATAPQQVLSNGRPVSNFTYSPDTKVLDICVALLMGEQFLVSWC

SEQ ID NO: 129 - DNA, 2832 bp, synthetic construct
  misc_feature 1..2832: note = Variant of the Homo Sapiens Lysosomal alpha-glucosidase
  source 1..2832: mol_type = other DNA
atggaatggagctgggtctttctcttcttcctgtcagtaacgactggtgtccactccggacacattctgtggcatgatttttctaccgtgcctagagagctttccggttcaagtcaagtcctcgaagaaacacatccagcccatcaggttggcgcatctaggccgggccctcgggacgctcaactccacccagggagacctagggccgttcccactcagtgcgacgtgccatggaactcacgcttcgattgtgcacctgagaaggctatcacgcaagagcagtgcgaggcccgcggatgttgttacataccggctaaacaggggctgcagggtgcgcagatgggccaaccttggtgcttcttcccaccatcctatccgagttacaagctggagaatctctcccagtctgaaatgggatataccgcaacactgactcggaccaccccctccttctttcccaaagatatcttgactctgagacttgacgtaatgatggagacagaaaacaggctccactttaccattaaggaccctgccaatcgccgatacgaggtgcctctggaaacaccacacgtgcacagtagagctccatcacctctgtattctgtcgagttctccgaagagccgtttggcgttatcgtcaggaggcagctcgacgggcgagtgcttctgaacacgactgtggccccgttgttctttgcggatcagtttctgcaactgtcaacaagtctcccttctcagtacattaccgggcttgcagagcatctgtccccactcatgctgagtacttcatggaacaaaatcacactgtggaatagagaccttgctcctactccaggagccaacttgtatggttctcaccctttctacttggccctggaagatggcggatcagcgcatggcgtattcctcctgaattccaacgcaatggacgttgttcttcagccatctcctgctttgagttggagatctacaggcgggatactggacgtctacatctttctgggtccagagcctaaatccgtagtgcagcagtatcttgatgtcgtcggatacccgtttatgccaccatattggggcctggggttccacttgtgccgctggggatattcatccaccgccattacacgacaagttgttgagaatatgaccagggcacattttcctctggatgtacagtggaacgacctggactacatggatagtcgccgcgacttcaccttcaataaggatgggttcagagactttcctgctatggtccaagaacttcaccagggaggcaggaggtacatgatgatcgtagatccgggaatttcttcttctggcccagccggttcatacagaccgtatgacgaaggactgcgacgaggcgtctttatcacgaacgagactggtcagcctttgataggcaaggtttggccagggtccaccgctttcccggatttcacaaatcctgaggcactggcctggtgggaagatatggtcgccgagtttcacgaccaggtcccatttgacgggatgtggatcgacatgaacgagccatccaacttcattagaggaagtgtggatggctgtccgaataatgagctggaaaaccctccttacgtaccaggcgttgttggtgggactcttcaagctgcgacgatttgcgcatcctcccatcagttcctgtcaacccactataacttgcacaatctgtacgggacaacagaggctatcgccagtcatagggccctggtaaaagctagaggaacacgccctttcgttatctctcgctcaacttttgcaggccacggtaggtatgccggacattggaccggcgacgtctggagttcttgggaacagctggcttcctccgttccagagatattgcagtttaacctgttgggagtcccacttgtaggtgcagatgtttgtggcttcctggggaacacctcagaagaattgtgcgtaagatggactcaactgggcgccttctacccttttatgcgcaatcacaactcactgacatctttgcctcaagaaccgtactcatttagtgagccagcacagcaggccatgaggaaggctcttggcctgagatatgcacttctgccgcatctgtacacccttttccaccaggctcatgtccatggagagactgttgcacgacctctgttcttggagttcccaaaagactcttccacgtggacagtcgatcaccagatgctgtggggcgaggctctgctgattacacctgtattgcaacctggtaaggccgaagttaccgggtactttccattggggacctggtatgatctgcaaacagtcccggttgaagctcttggaagtcttccacctccacctgctgcaccaagggagcctgcgatccactctgaaggacagtgggtaactttgcctgcaccgctggacaccatcaatgtccatctgcgcgaaggctacatcataccacttcaaggtcctggactgaccactacagagtctagaaaacaaccaatggctcttgctgttgcactgactaaaagcggcgaagcaaggggtgagctgttctgggacgacggagagtcactggaggtactcgaacgaggcgcgtatacgcaggtcatttttgaggctcgcaataatacgatcgttaacgagctggtccacgtcacttcagaaggtgcaggccttcagttgggcaaggtaactgtcctgggagttgctacagcaccgcagcaggtcttgtccaacggacggcccgtaagcaactttacctatagtcctgataccaaagttctggacatctgcgttgctctgctgatgggtgagcagttcctggtatcatggtgc

SEQ ID NO: 130 - protein, 944 aa, synthetic construct
  REGION 1..944: note = Variant of the Homo Sapiens Lysosomal alpha-glucosidase
MEWSWVFLFFLSVTTGVHSGHILWHDFSTVPRELSGSSQVLEETHPAHQVGASRPGPRDAQLHPGRPRAVPTQCDVPWNSRFDCAPEKAITQEQCEARGCCYIPAKQGLQGAQMGQPWCFFPPSYPSYKLENLSQSEMGYTATLTRTTPSFFPKDILTLRLDVMMETENRLHFTIKDPANRRYEVPLETPHVHSRAPSPLYSVEFSEEPFGVIVRRQLDGRVLLNTTVAPLFFADQFLQLSTSLPSQYITGLAEHLSPLMLSTSWNKITLWNRDLAPTPGANLYGSHPFYLALEDGGSAHGVFLLNSNAMDVVLQPSPALSWRSTGGILDVYIFLGPEPKSVVQQYLDVVGYPFMPPYWGLGFHLCRWGYSSTAITRQVVENMTRAHFPLDVQWNDLDYMDSRRDFTFNKDGFRDFPAMVQELHQGGRRYMMIVDPGISSSGPAGSYRPYDEGLRRGVFITNETGQPLIGKVWPGSTAFPDFTNPEALAWWEDMVAEFHDQVPFDGMWIDMNEPSNFIRGSVDGCPNNELENPPYVPGVVGGTLQAATICASSHQFLSTHYNLHNLYGTTEAIASHRALVKARGTRPFVISRSTFAGHGRYAGHWTGDVWSSWEQLASSVPEILQFNLLGVPLVGADVCGFLGNTSEELCVRWTQLGAFYPFMRNHNSLTSLPQEPYSFSEPAQQAMRKALGLRYALLPHLYTLFHQAHVHGETVARPLFLEFPKDSSTWTVDHQMLWGEALLITPVLQPGKAEVTGYFPLGTWYDLQTVPVEALGSLPPPPAAPREPAIHSEGQWVTLPAPLDTINVHLREGYIIPLQGPGLTTTESRKQPMALAVALTKSGEARGELFWDDGESLEVLERGAYTQVIFEARNNTIVNELVHVTSEGAGLQLGKVTVLGVATAPQQVLSNGRPVSNFTYSPDTKVLDICVALLMGEQFLVSWC

SEQ ID NO: 131 - DNA, 2832 bp, synthetic construct
  misc_feature 1..2832: note = Variant of the Homo Sapiens Lysosomal alpha-glucosidase
  source 1..2832: mol_type = other DNA
atggaatggagctgggtctttctcttcttcctgtcagtaacgactggtgtccactccggacacattctgtggcatgatttttctaccgtgcctagagagctttccggttcaagtcaagtcctcgaagaaacacatccagcccatcaggttggcgcatctaggccgggccctcgggacgctcaactccacccagggagacctagggccgttcccactcagtgcgacgtgccagagaactcacgcttcgattgtgcacctgagaaggctatcacgcaagagcagtgcgaggcccgcggatgttgttacataccggctaaacaggggctgcagggtgcgcagatgggccaaccttggtgcttcttcccaccatcctatccgagttacaagctggagaatctctcccagtctgaaatgggatataccgcaacactgactcggaccaccccctccttctttcccaaagatatcttgactctgagacttgacgtaatgatggagacagaaaacaggctccactttaccattaaggaccctgccaatcgccgatacgaggtgcctctggaaacaccacacgtgcacagtagagctccatcacctctgtattctgtcgagttctccgaagagccgtttggcgttatcgtcaggaggcagctcgacgggcgagtgcttctgaacacgactgtggccccgttgttctttgcggatcagtttctgcaactgtcaacaagtctcccttctcagtacattaccgggcttgcagagcatctgtccccactcatgctgagtacttcatggaacaaaatcacactgtggaatagagaccttgctcctactccaggagccaacttgtatggttctcaccctttctacttggccctggaagatggcggatcagcgcatggcgtattcctcctgaattccaacgcaatggacgttgttcttcagccatctcctgctttgagttggagatctacaggcgggatactggacgtctacatctttctgggtccagagcctaaatccgtagtgcagcagtatcttgatgtcgtcggatacccgtttatgccaccatattggggcctggggttccacttgtgccgctggggatattcatccaccgccattacacgacaagttgttgagaatatgaccagggcacattttcctctggatgtacagtggaacgacctggactacatggatagtcgccgcgacttcaccttcaataaggatgggttcagagactttcctgctatggtccaagaacttcaccagggaggcaggaggtacatgatgatcgtagatccgggaatttcttcttctggcccagccggttcatacagaccgtatgacgaaggactgcgacgaggcgtctttatcacgaacgagactggtcagcctttgataggcaaggtttggccagggtccaccgctttcccggatttcacaaatcctgaggcactggcctggtgggaagatatggtcgccgagtttcacgaccaggtcccatttgacgggatgtggatcgacatgaacgagccatccaacttcattagaggaagttttgatggctgtccgaataatgagctggaaaaccctccttacgtaccaggcgttgttggtgggactcttcaagctgcgacgatttgcgcatcctcccatcagttcctgtcaacccactataacttgcacaatctgtacgggacaacagaggctatcgccagtcatagggccctggtaaaagctagaggaacacgccctttcgttatctctcgctcaacttttgcaggccacggtaggtatgccggacattggaccggcgacgtctggagttcttgggaacagctggcttcctccgttccagagatattgcagtttaacctgttgggagtcccacttgtaggtgcagatgtttgtggcttcctggggaacacctcagaagaattgtgcgtaagatggactcaactgggcgccttctacccttttatgcgcaatcacaactcactgacatctttgcctcaagaaccgtactcatttagtgagccagcacagcaggccatgaggaaggctcttggcctgagatatgcacttctgccgcatctgtacacccttttccaccaggctcatgtccatggagagactgttgcacgacctctgttcttggagttcccaaaagactcttccacgtggacagtcgatcaccagatgctgtggggcgaggctctgctgattacacctgtattgcaacctggtaaggccgaagttaccgggtactttccattggggacctggtatgatctgcaaacagtcccggttgaagctcttggaagtcttccacctccacctgctgcaccaagggagcctgcgatccactctgaaggacagtgggtaactttgcctgcaccgctggacaccatcaatgtccatctgcgcgaaggctacatcataccacttcaaggtcctggactgaccactacagagtctagaaaacaaccaatggctcttgctgttgcactgactaaaagcggcgaagcaaggggtgagctgttctgggacgacggagagtcactggaggtactcgaacgaggcgcgtatacgcaggtcatttttgaggctcgcaataatacgatcgttaacgagctggtccacgtcacttcagaaggtgcaggccttcagttgggcaaggtaactgtcctgggagttgctacagcaccgcagcaggtcttgtccaacggacggcccgtaagcaactttacctatagtcctgataccaaagttctggacatctgcgttgctctgctgatgggtgagcagttcctggtatcatggtgc

SEQ ID NO: 132 - protein, 944 aa, synthetic construct
  REGION 1..944: note = Variant of the Homo Sapiens Lysosomal alpha-glucosidase
MEWSWVFLFFLSVTTGVHSGHILWHDFSTVPRELSGSSQVLEETHPAHQVGASRPGPRDAQLHPGRPRAVPTQCDVPENSRFDCAPEKAITQEQCEARGCCYIPAKQGLQGAQMGQPWCFFPPSYPSYKLENLSQSEMGYTATLTRTTPSFFPKDILTLRLDVMMETENRLHFTIKDPANRRYEVPLETPHVHSRAPSPLYSVEFSEEPFGVIVRRQLDGRVLLNTTVAPLFFADQFLQLSTSLPSQYITGLAEHLSPLMLSTSWNKITLWNRDLAPTPGANLYGSHPFYLALEDGGSAHGVFLLNSNAMDVVLQPSPALSWRSTGGILDVYIFLGPEPKSVVQQYLDVVGYPFMPPYWGLGFHLCRWGYSSTAITRQVVENMTRAHFPLDVQWNDLDYMDSRRDFTFNKDGFRDFPAMVQELHQGGRRYMMIVDPGISSSGPAGSYRPYDEGLRRGVFITNETGQPLIGKVWPGSTAFPDFTNPEALAWWEDMVAEFHDQVPFDGMWIDMNEPSNFIRGSFDGCPNNELENPPYVPGVVGGTLQAATICASSHQFLSTHYNLHNLYGTTEAIASHRALVKARGTRPFVISRSTFAGHGRYAGHWTGDVWSSWEQLASSVPEILQFNLLGVPLVGADVCGFLGNTSEELCVRWTQLGAFYPFMRNHNSLTSLPQEPYSFSEPAQQAMRKALGLRYALLPHLYTLFHQAHVHGETVARPLFLEFPKDSSTWTVDHQMLWGEALLITPVLQPGKAEVTGYFPLGTWYDLQTVPVEALGSLPPPPAAPREPAIHSEGQWVTLPAPLDTINVHLREGYIIPLQGPGLTTTESRKQPMALAVALTKSGEARGELFWDDGESLEVLERGAYTQVIFEARNNTIVNELVHVTSEGAGLQLGKVTVLGVATAPQQVLSNGRPVSNFTYSPDTKVLDICVALLMGEQFLVSWC

SEQ ID NO: 133 - DNA, 2832 bp, synthetic construct
  misc_feature 1..2832: note = Variant of the Homo Sapiens Lysosomal alpha-glucosidase
  source 1..2832: mol_type = other DNA
atggaatggagctgggtctttctcttcttcctgtcagtaacgactggtgtccactccggacacattctgtggcatgatttttctaccgtgcctagagagctttccggttcaagtcaagtcctcgaagaaacacatccagcccatcaggttggcgcatctaggccgggccctcgggacgctcaactccacccagggagacctagggccgttcccactcagtgcgacgtgccagagaactcacgcttcgattgtgcacctgagaaggctatcacgcaagagcagtgcgaggcccgcggatgttgttacataccggctaaacaggggctgcagggtgcgcagatgggccaaccttggtgcttcttcccaccatcctatccgagttacaagctggagaatctctcccagtctgaaatgggatataccgcaacactgactcggaccaccccctccttctttcccaaagatatcttgactctgagacttgacgtaatgatggagacagaaaacaggctccactttaccattaaggaccctgccaatcgccgatacgaggtgcctctggaaacaccacacgtgcacagtagagctccatcacctctgtattctgtcgagttctccgaagagccgtttggcgttatcgtcaggaggcagctcgacgggcgagtgcttctgaacacgactgtggccccgttgttctttgcggatcagtttctgcaactgtcaacaagtctcccttctcagtacattaccgggcttgcagagcatctgtccccactcatgctgagtacttcatggaacaaaatcacactgtggaatagagaccttgctcctactccaggagccaacttgtatggttctcaccctttctacttggccctggaagatggcggatcagcgcatggcgtattcctcctgaattccaacgcaatggacgttgttcttcagccatctcctgctttgagttggagatctacaggcgggatactggacgtctacatctttctgggtccagagcctaaatccgtagtgcagcagtatcttgatgtcgtcggatacccgtttatgccaccatattggggcctggggttccacttgtgccgctggggatattcatccaccgccattacacgacaagttgttgagaatatgaccagggcacattttcctctggatgtacagtggaacgacctggactacatggatagtcgccgcgacttcaccttcaataaggatgggttcagagactttcctgctatggtccaagaacttcaccagggaggcaggaggtacatgatgatcgtagatccgggaatttcttcttctggcccagccggttcatacagaccgtatgacgaaggactgcgacgaggcgtctttatcacgaacgagactggtcagcctttgataggcaaggtttggccagggtccaccgctttcccggatttcacaaatcctgaggcactggcctggtgggaagatatggtcgccgagtttcacgaccaggtcccatttgacgggatgtggatcgacatgaacgagccatccaacttcattagaggaagtcctgatggctgtccgaataatgagctggaaaaccctccttacgtaccaggcgttgttggtgggactcttcaagctgcgacgatttgcgcatcctcccatcagttcctgtcaacccactataacttgcacaatctgtacgggacaacagaggctatcgccagtcatagggccctggtaaaagctagaggaacacgccctttcgttatctctcgctcaacttttgcaggccacggtaggtatgccggacattggaccggcgacgtctggagttcttgggaacagctggcttcctccgttccagagatattgcagtttaacctgttgggagtcccacttgtaggtgcagatgtttgtggcttcctggggaacacctcagaagaattgtgcgtaagatggactcaactgggcgccttctacccttttatgcgcaatcacaactcactgacatctttgcctcaagaaccgtactcatttagtgagccagcacagcaggccatgaggaaggctcttggcctgagatatgcacttctgccgcatctgtacacccttttccaccaggctcatgtccatggagagactgttgcacgacctctgttcttggagttcccaaaagactcttccacgtggacagtcgatcaccagatgctgtggggcgaggctctgctgattacacctgtattgcaacctggtaaggccgaagttaccgggtactttccattggggacctggtatgatctgcaaacagtcccggttgaagctcttggaagtcttccacctccacctgctgcaccaagggagcctgcgatccactctgaaggacagtgggtaactttgcctgcaccgctggacaccatcaatgtccatctgcgcgaaggctacatcataccacttcaaggtcctggactgaccactacagagtctagaaaacaaccaatggctcttgctgttgcactgactaaaagcggcgaagcaaggggtgagctgttctgggacgacggagagtcactggaggtactcgaacgaggcgcgtatacgcaggtcatttttgaggctcgcaataatacgatcgttaacgagctggtccacgtcacttcagaaggtgcaggccttcagttgggcaaggtaactgtcctgggagttgctacagcaccgcagcaggtcttgtccaacggacggcccgtaagcaactttacctatagtcctgataccaaagttctggacatctgcgttgctctgctgatgggtgagcagttcctggtatcatggtgc

SEQ ID NO: 134 - protein, 944 aa, synthetic construct
  REGION 1..944: note = Variant of the Homo Sapiens Lysosomal alpha-glucosidase
MEWSWVFLFFLSVTTGVHSGHILWHDFSTVPRELSGSSQVLEETHPAHQVGASRPGPRDAQLHPGRPRAVPTQCDVPENSRFDCAPEKAITQEQCEARGCCYIPAKQGLQGAQMGQPWCFFPPSYPSYKLENLSQSEMGYTATLTRTTPSFFPKDILTLRLDVMMETENRLHFTIKDPANRRYEVPLETPHVHSRAPSPLYSVEFSEEPFGVIVRRQLDGRVLLNTTVAPLFFADQFLQLSTSLPSQYITGLAEHLSPLMLSTSWNKITLWNRDLAPTPGANLYGSHPFYLALEDGGSAHGVFLLNSNAMDVVLQPSPALSWRSTGGILDVYIFLGPEPKSVVQQYLDVVGYPFMPPYWGLGFHLCRWGYSSTAITRQVVENMTRAHFPLDVQWNDLDYMDSRRDFTFNKDGFRDFPAMVQELHQGGRRYMMIVDPGISSSGPAGSYRPYDEGLRRGVFITNETGQPLIGKVWPGSTAFPDFTNPEALAWWEDMVAEFHDQVPFDGMWIDMNEPSNFIRGSPDGCPNNELENPPYVPGVVGGTLQAATICASSHQFLSTHYNLHNLYGTTEAIASHRALVKARGTRPFVISRSTFAGHGRYAGHWTGDVWSSWEQLASSVPEILQFNLLGVPLVGADVCGFLGNTSEELCVRWTQLGAFYPFMRNHNSLTSLPQEPYSFSEPAQQAMRKALGLRYALLPHLYTLFHQAHVHGETVARPLFLEFPKDSSTWTVDHQMLWGEALLITPVLQPGKAEVTGYFPLGTWYDLQTVPVEALGSLPPPPAAPREPAIHSEGQWVTLPAPLDTINVHLREGYIIPLQGPGLTTTESRKQPMALAVALTKSGEARGELFWDDGESLEVLERGAYTQVIFEARNNTIVNELVHVTSEGAGLQLGKVTVLGVATAPQQVLSNGRPVSNFTYSPDTKVLDICVALLMGEQFLVSWC

SEQ ID NO: 135 - DNA, 2832 bp, synthetic construct
  misc_feature 1..2832: note = Variant of the Homo Sapiens Lysosomal alpha-glucosidase
  source 1..2832: mol_type = other DNA
atggaatggagctgggtctttctcttcttcctgtcagtaacgactggtgtccactccggacacattctgtggcatgatttttctaccgtgcctagagagctttccggttcaagtcaagtcctcgaagaaacacatccagcccatcaggttggcgcatctaggccgggccctcgggacgctcaactccacccagggagacctagggccgttcccactcagtgcgacgtgccagagaactcacgcttcgattgtgcacctgagaaggctatcacgcaagagcagtgcgaggcccgcggatgttgttacataccggctaaacaggggctgcagggtgcgcagatgggccaaccttggtgcttcttcccaccatcctatccgagttacaagctggagaatctctcccagtctgaaatgggatataccgcaacactgactcggaccaccccctccttctttcccaaagatatcttgactctgagacttgacgtaatgatggagacagaaaacaggctccactttaccattaaggaccctgccaatcgccgatacgaggtgcctctggaaacaccacacgtgcacagtagagctccatcacctctgtattctgtcgagttctccgaagagccgtttggcgttatcgtcaggaggcagctcgacgggcgagtgcttctgaacacgactgtggccccgttgttctttgcggatcagtttctgcaactgtcaacaagtctcccttctcagtacattaccgggcttgcagagcatctgtccccactcatgctgagtacttcatggaacaaaatcacactgtggaatagagaccttgctcctactccaggagccaacttgtatggttctcaccctttctacttggccctggaagatggcggatcagcgcatggcgtattcctcctgaattccaacgcaatggacgttgttcttcagccatctcctgctttgagttggagatctacaggcgggatactggacgtctacatctttctgggtccagagcctaaatccgtagtgcagcagtatcttgatgtcgtcggatacccgtttatgccaccatattggggcctggggttccacttgtgccgctggggatattcatccaccgccattacacgacaagttgttgagaatatgaccagggcacattttcctctggatgtacagtggaacgacctggactacatggatagtcgccgcgacttcaccttcaataaggatgggttcagagactttcctgctatggtccaagaacttcaccagggaggcaggaggtacatgatgatcgtagatccgggaatttcttcttctggcccagccggttcatacagaccgtatgacgaaggactgcgacgaggcgtctttatcacgaacgagactggtcagcctttgataggcaaggtttggccagggtccaccgctttcccggatttcacaaatcctgaggcactggcctggtgggaagatatggtcgccgagtttcacgaccaggtcccatttgacgggatgtggatcgacatgaacgagccatccaacttcattagaggaagtgtggatggctgtccgaataatgagctggaaaaccctccttacgtaccaggcgttgttggtgggactcttcaagctgcgacgatttgcgcatcctcccatcagttcctgtcaacccactataacttgcacaatctgtacgggacaacagaggctatcgccagtcatagggccctggtaaaagctagaggaacacgccctttcgttatctctcgctcaacttttgcaggccacggtaggtatgccggacattggaccggcgacgtctggagttcttgggaacagctggcttcctccgttccagagatattgcagtttaacctgttgggagtcccacttgtaggtgcagatgtttgtggcttcctggggaacacctcagaagaattgtgcgtaagatggactcaactgggcgccttctacccttttatgcgcaatcacaactcactgacatctttgcctcaagaaccgtactcatttagtgagccagcacagcaggccatgaggaaggctcttggcctgagatatgcacttctgccgcatctgtacacccttttccaccaggctcatgtccatggagagactgttgcacgacctctgttcttggagttcccaaaagactcttccacgtggacagtcgatcaccagatgctgtggggcgaggctctgctgattacacctgtattgcaacctggtaaggccgaagttaccgggtactttccattggggacctggtatgatctgcaaacagtcccggttgaagctcttggaagtcttccacctccacctgctgcaccaagggagcctgcgatccactctgaaggacagtgggtaactttgcctgcaccgctggacaccatcaatgtccatctgcgcgaaggctacatcataccacttcaaggtcctggactgaccactacagagtctagagtgcaaccaatggctcttgctgttgcactgactaaaagcggcgaagcaaggggtgagctgttctgggacgacggagagtcactggaggtactcgaacgaggcgcgtatacgcaggtcatttttgaggctcgcaataatacgatcgttaacgagctggtccacgtcacttcagaaggtgcaggccttcagttgggcaaggtaactgtcctgggagttgctacagcaccgcagcaggtcttgtccaacggacggcccgtaagcaactttacctatagtcctgataccaaagttctggacatctgcgttgctctgctgatgggtgagcagttcctggtatcatggtgc

SEQ ID NO: 136 - protein, 944 aa, synthetic construct
  REGION 1..944: note = Variant of the Homo Sapiens Lysosomal alpha-glucosidase
MEWSWVFLFFLSVTTGVHSGHILWHDFSTVPRELSGSSQVLEETHPAHQVGASRPGPRDAQLHPGRPRAVPTQCDVPENSRFDCAPEKAITQEQCEARGCCYIPAKQGLQGAQMGQPWCFFPPSYPSYKLENLSQSEMGYTATLTRTTPSFFPKDILTLRLDVMMETENRLHFTIKDPANRRYEVPLETPHVHSRAPSPLYSVEFSEEPFGVIVRRQLDGRVLLNTTVAPLFFADQFLQLSTSLPSQYITGLAEHLSPLMLSTSWNKITLWNRDLAPTPGANLYGSHPFYLALEDGGSAHGVFLLNSNAMDVVLQPSPALSWRSTGGILDVYIFLGPEPKSVVQQYLDVVGYPFMPPYWGLGFHLCRWGYSSTAITRQVVENMTRAHFPLDVQWNDLDYMDSRRDFTFNKDGFRDFPAMVQELHQGGRRYMMIVDPGISSSGPAGSYRPYDEGLRRGVFITNETGQPLIGKVWPGSTAFPDFTNPEALAWWEDMVAEFHDQVPFDGMWIDMNEPSNFIRGSVDGCPNNELENPPYVPGVVGGTLQAATICASSHQFLSTHYNLHNLYGTTEAIASHRALVKARGTRPFVISRSTFAGHGRYAGHWTGDVWSSWEQLASSVPEILQFNLLGVPLVGADVCGFLGNTSEELCVRWTQLGAFYPFMRNHNSLTSLPQEPYSFSEPAQQAMRKALGLRYALLPHLYTLFHQAHVHGETVARPLFLEFPKDSSTWTVDHQMLWGEALLITPVLQPGKAEVTGYFPLGTWYDLQTVPVEALGSLPPPPAAPREPAIHSEGQWVTLPAPLDTINVHLREGYIIPLQGPGLTTTESRVQPMALAVALTKSGEARGELFWDDGESLEVLERGAYTQVIFEARNNTIVNELVHVTSEGAGLQLGKVTVLGVATAPQQVLSNGRPVSNFTYSPDTKVLDICVALLMGEQFLVSWC

SEQ ID NO: 137 - DNA, 2832 bp, synthetic construct
  misc_feature 1..2832: note = Variant of the Homo Sapiens Lysosomal alpha-glucosidase
  source 1..2832: mol_type = other DNA
atggaatggagctgggtctttctcttcttcctgtcagtaacgactggtgtccactccggacacattctgtggcatgatttttctaccgtgcctagagagctttccggttcaagtcaagtcctcgaagaaacacatccagcccatcaggttggcgcatctaggccgggccctcgggacgctcaactccacccagggagacctagggccgttcccactcagtgcgacgtgccagagaactcacgcttcgattgtgcacctgagaaggctatcacgcaagagcagtgcgaggcccgcggatgttgttacataccggctaaacaggggctgcagggtgcgcagatgggccaaccttggtgcttcttcccaccatcctatccgagttacaagctggagaatctctcccagtctgaaatgggatataccgcaacactgactcggaccaccccctccttctttcccaaagatatcttgactctgagacttgacgtaatgatggagacagaaaacaggctccactttaccattaaggaccctgccaatcgccgatacgaggtgcctctggaaacaccacacgtgcacagtagagctccatcacctctgtattctgtcgagttctccgaagagccgtttggcgttatcgtcaggaggcagctcgacgggcgagtgcttctgaacacgactgtggccccgttgttctttgcggatcagtttctgcaactgtcaacaagtctcccttctcagtacattaccgggcttgcagagcatctgtccccactcatgctgagtacttcatggaacaaaatcacactgtggaatagagaccttgctcctactccaggagccaacttgtatggttctcaccctttctacttggccctggaagatggcggatcagcgcatggcgtattcctcctgaattccaacgcaatggacgttgttcttcagccatctcctgctttgagttggagatctacaggcgggatactggacgtctacatctttctgggtccagagcctaaatccgtagtgcagcagtatcttgatgtcgtcggatacccgtttatgccaccatattggggcctggggttccacttgtgccgctggggatattcatccaccgccattacacgacaagttgttgagaatatgaccagggcacattttcctctggatgtacagtggaacgacctggactacatggatagtcgccgcgacttcaccttcaataaggatgggttcagagactttcctgctatggtccaagaacttcaccagggaggcaggaggtacatgatgatcgtagatccgggaatttcttcttctggcccagccggttcatacagaccgtatgacgaaggactgcgacgaggcgtctttatcacgaacgagactggtcagcctttgataggcaaggtttggccagggtccaccgctttcccggatttcacaaatcctgaggcactggcctggtgggaagatatggtcgccgagtttcacgaccaggtcccatttgacgggatgtggatcgacatgaacgagccatccaacttcattagaggaagtgtggatggctgtccgaataatgagctggaaaaccctccttacgtaccaggcgttgttggtgggactcttcaagctgcgacgatttgcgcatcctcccatcagttcctgtcaacccactataacttgcacaatctgtacgggacaacagaggctatcgccagtcatagggccctggtaaaagctagaggaacacgccctttcgttatctctcgctcaacttttgcaggccacggtaggtatgccggacattggaccggcgacgtctggagttcttgggaacagctggcttcctccgttccagagatattgcagtttaacctgttgggagtcccacttgtaggtgcagatgtttgtggcttcctggggaacacctcagaagaattgtgcgtaagatggactcaactgggcgccttctacccttttatgcgcaatcacaactcactgacatctttgcctcaagaaccgtactcatttagtgagccagcacagcaggccatgaggaaggctcttggcctgagatatgcacttctgccgcatctgtacacccttttccaccaggctcatgtcatgggagagactgttgcacgacctctgttcttggagttcccaaaagactcttccacgtggacagtcgatcaccagatgctgtggggcgaggctctgctgattacacctgtattgcaacctggtaaggccgaagttaccgggtactttccattggggacctggtatgatctgcaaacagtcccggttgaagctcttggaagtcttccacctccacctgctgcaccaagggagcctgcgatccactctgaaggacagtgggtaactttgcctgcaccgctggacaccatcaatgtccatctgcgcgaaggctacatcataccacttcaaggtcctggactgaccactacagagtctagaaaacaaccaatggctcttgctgttgcactgactaaaagcggcgaagcaaggggtgagctgttctgggacgacggagagtcactggaggtactcgaacgaggcgcgtatacgcaggtcatttttgaggctcgcaataatacgatcgttaacgagctggtccacgtcacttcagaaggtgcaggccttcagttgggcaaggtaactgtcctgggagttgctacagcaccgcagcaggtcttgtccaacggacggcccgtaagcaactttacctatagtcctgataccaaagttctggacatctgcgttgctctgctgatgggtgagcagttcctggtatcatggtgc

SEQ ID NO: 138 - protein, 944 aa, synthetic construct
  REGION 1..944: note = Variant of the Homo Sapiens Lysosomal alpha-glucosidase
MEWSWVFLFFLSVTTGVHSGHILWHDFSTVPRELSGSSQVLEETHPAHQVGASRPGPRDAQLHPGRPRAVPTQCDVPENSRFDCAPEKAITQEQCEARGCCYIPAKQGLQGAQMGQPWCFFPPSYPSYKLENLSQSEMGYTATLTRTTPSFFPKDILTLRLDVMMETENRLHFTIKDPANRRYEVPLETPHVHSRAPSPLYSVEFSEEPFGVIVRRQLDGRVLLNTTVAPLFFADQFLQLSTSLPSQYITGLAEHLSPLMLSTSWNKITLWNRDLAPTPGANLYGSHPFYLALEDGGSAHGVFLLNSNAMDVVLQPSPALSWRSTGGILDVYIFLGPEPKSVVQQYLDVVGYPFMPPYWGLGFHLCRWGYSSTAITRQVVENMTRAHFPLDVQWNDLDYMDSRRDFTFNKDGFRDFPAMVQELHQGGRRYMMIVDPGISSSGPAGSYRPYDEGLRRGVFITNETGQPLIGKVWPGSTAFPDFTNPEALAWWEDMVAEFHDQVPFDGMWIDMNEPSNFIRGSVDGCPNNELENPPYVPGVVGGTLQAATICASSHQFLSTHYNLHNLYGTTEAIASHRALVKARGTRPFVISRSTFAGHGRYAGHWTGDVWSSWEQLASSVPEILQFNLLGVPLVGADVCGFLGNTSEELCVRWTQLGAFYPFMRNHNSLTSLPQEPYSFSEPAQQAMRKALGLRYALLPHLYTLFHQAHVMGETVARPLFLEFPKDSSTWTVDHQMLWGEALLITPVLQPGKAEVTGYFPLGTWYDLQTVPVEALGSLPPPPAAPREPAIHSEGQWVTLPAPLDTINVHLREGYIIPLQGPGLTTTESRKQPMALAVALTKSGEARGELFWDDGESLEVLERGAYTQVIFEARNNTIVNELVHVTSEGAGLQLGKVTVLGVATAPQQVLSNGRPVSNFTYSPDTKVLDICVALLMGEQFLVSWC

SEQ ID NO: 139 - DNA, 2832 bp, synthetic construct
  misc_feature 1..2832: note = Variant of the Homo Sapiens Lysosomal alpha-glucosidase
  source 1..2832: mol_type = other DNA
atggaatggagctgggtctttctcttcttcctgtcagtaacgactggtgtccactccggacacattctgtggcatgattttacgaccgtgcctagagagctttccggttcaagtcaagtcctcgaagaaacacatccagcccatcaggttggcgcatctaggccgggccctcgggacgctcaactccacccagggagacctagggccgttcccactcagtgcgacgtgccagagaactcacgcttcgattgtgcacctgagaaggctatcacgcaagagcagtgcgaggcccgcggatgttgttacataccggctaaacaggggctgcagggtgcgcagatgggccaaccttggtgcttcttcccaccatcctatccgagttacaagctggagaatctctcccagtctgaaatgggatataccgcaacactgactcggaccaccccctccttctttcccaaagatatcttgactctgagacttgacgtaatgatggagacagaaaacaggctccactttaccattaaggaccctgccaatcgccgatacgaggtgcctctggaaacaccacacgtgcacagtagagctccatcacctctgtattctgtcgagttctccgaagagccgtttggcgttatcgtcaggaggcagctcgacgggcgagtgcttctgaacacgactgtggccccgttgttctttgcggatcagtttctgcaactgtcaacaagtctcccttctcagtacattaccgggcttgcagagcatctgtccccactcatgctgagtacttcatggaacaaaatcacactgtggaatagagaccttgctcctactccaggagccaacttgtatggttctcaccctttctacttggccctggaagatggcggatcagcgcatggcgtattcctcctgaattccaacgcaatggacgttgttcttcagccatctcctgctttgagttggagatctacaggcgggatactggacgtctacatctttctgggtccagagcctaaatccgtagtgcagcagtatcttgatgtcgtcggatacccgtttatgccaccatattggggcctggggttccacttgtgccgctggggatattcatccaccgccattacacgacaagttgttgagaatatgaccagggcacattttcctctggatgtacagtggaacgacctggactacatggatagtcgccgcgacttcaccttcaataaggatgggttcagagactttcctgctatggtccaagaacttcaccagggaggcaggaggtacatgatgatcgtagatccgggaatttcttcttctggcccagccggttcatacagaccgtatgacgaaggactgcgacgaggcgtctttatcacgaacgagactggtcagcctttgataggcaaggtttggccagggtccaccgctttcccggatttcacaaatcctgaggcactggcctggtgggaagatatggtcgccgagtttcacgaccaggtcccatttgacgggatgtggatcgacatgaacgagccatccaacttcattagaggaagtgtggatggctgtccgaataatgagctggaaaaccctccttacgtaccaggcgttgttggtgggactcttcaagctgcgacgatttgcgcatcctcccatcagttcctgtcaacccactataacttgcacaatctgtacgggacaacagaggctatcgccagtcatagggccctggtaaaagctagaggaacacgccctttcgttatctctcgctcaacttttgcaggccacggtaggtatgccggacattggaccggcgacgtctggagttcttgggaacagctggcttcctccgttccagagatattgcagtttaacctgttgggagtcccacttgtaggtgcagatgtttgtggcttcctggggaacacctcagaagaattgtgcgtaagatggactcaactgggcgccttctacccttttatgcgcaatcacaactcactgacatctttgcctcaagaaccgtactcatttagtgagccagcacagcaggccatgaggaaggctcttggcctgagatatgcacttctgccgcatctgtacacccttttccaccaggctcatgtccatggagagactgttgcacgacctctgttcttggagttcccaaaagactcttccacgtggacagtcgatcaccagatgctgtggggcgaggctctgctgattacacctgtattgcaacctggtaaggccgaagttaccgggtactttccattggggacctggtatgatctgcaaacagtcccggttgaagctcttggaagtcttccacctccacctgctgcaccaagggagcctgcgatccactctgaaggacagtgggtaactttgcctgcaccgctggacaccatcaatgtccatctgcgcgaaggctacatcataccacttcaaggtcctggactgaccactacagagtctagaaaacaaccaatggctcttgctgttgcactgactaaaagcggcgaagcaaggggtgagctgttctgggacgacggagagtcactggaggtactcgaacgaggcgcgtatacgcaggtcatttttgaggctcgcaataatacgatcgttaacgagctggtccacgtcacttcagaaggtgcaggccttcagttgggcaaggtaactgtcctgggagttgctacagcaccgcagcaggtcttgtccaacggacggcccgtaagcaactttacctatagtcctgataccaaagttctggacatctgcgttgctctgctgatgggtgagcagttcctggtatcatggtgc

SEQ ID NO: 140 - protein, 944 aa, synthetic construct
  REGION 1..944: note = Variant of the Homo Sapiens Lysosomal alpha-glucosidase
MEWSWVFLFFLSVTTGVHSGHILWHDFTTVPRELSGSSQVLEETHPAHQVGASRPGPRDAQLHPGRPRAVPTQCDVPENSRFDCAPEKAITQEQCEARGCCYIPAKQGLQGAQMGQPWCFFPPSYPSYKLENLSQSEMGYTATLTRTTPSFFPKDILTLRLDVMMETENRLHFTIKDPANRRYEVPLETPHVHSRAPSPLYSVEFSEEPFGVIVRRQLDGRVLLNTTVAPLFFADQFLQLSTSLPSQYITGLAEHLSPLMLSTSWNKITLWNRDLAPTPGANLYGSHPFYLALEDGGSAHGVFLLNSNAMDVVLQPSPALSWRSTGGILDVYIFLGPEPKSVVQQYLDVVGYPFMPPYWGLGFHLCRWGYSSTAITRQVVENMTRAHFPLDVQWNDLDYMDSRRDFTFNKDGFRDFPAMVQELHQGGRRYMMIVDPGISSSGPAGSYRPYDEGLRRGVFITNETGQPLIGKVWPGSTAFPDFTNPEALAWWEDMVAEFHDQVPFDGMWIDMNEPSNFIRGSVDGCPNNELENPPYVPGVVGGTLQAATICASSHQFLSTHYNLHNLYGTTEAIASHRALVKARGTRPFVISRSTFAGHGRYAGHWTGDVWSSWEQLASSVPEILQFNLLGVPLVGADVCGFLGNTSEELCVRWTQLGAFYPFMRNHNSLTSLPQEPYSFSEPAQQAMRKALGLRYALLPHLYTLFHQAHVHGETVARPLFLEFPKDSSTWTVDHQMLWGEALLITPVLQPGKAEVTGYFPLGTWYDLQTVPVEALGSLPPPPAAPREPAIHSEGQWVTLPAPLDTINVHLREGYIIPLQGPGLTTTESRKQPMALAVALTKSGEARGELFWDDGESLEVLERGAYTQVIFEARNNTIVNELVHVTSEGAGLQLGKVTVLGVATAPQQVLSNGRPVSNFTYSPDTKVLDICVALLMGEQFLVSWC

SEQ ID NO: 141 - DNA, 2832 bp, synthetic construct
  misc_feature 1..2832: note = Variant of the Homo Sapiens Lysosomal alpha-glucosidase
  source 1..2832: mol_type = other DNA
atggaatggagctgggtctttctcttcttcctgtcagtaacgactggtgtccactccggacacattctgtggcatgatttttctaccgtgcctagagagctttccggttcaagtcaagtcctcgaagaaacacatccagcccatcaggttggcgcatctaggccgggccctcgggacgctcaactccacccagggagacctagggccgttcccactcagtgcgacgtgccagagaactcacgcttcgattgtgcacctgagaaggctatcacgcaagagcagtgcgaggcccgcggatgttgttacataccggctaaacaggggctgcagggtgcgcagatgggccaaccttggtgcttcttcccaccatcctatccgagttacaagctggagaatctctcccagtctgaaatgggatataccgcaacactgactcggaccaccccctccttctttcccaaagatatcttgactctgagacttgacgtaatgatggagacagaaaacaggctccactttaccattaaggaccctgccaatcgccgatacgaggtgcctctggaaacaccacacgtgcacagtagagctccatcacctctgtattctgtcgagttctccgaagagccgtttggcgttatcgtcaggaggcagctcgacgggcgagtgcttctgaacacgactgtggccccgttgttctttgcggatcagtttctgcaactgtcaacaagtctcccttctcagtacattaccgggcttgcagagcatctgtccccactcatgctgagtacttcatggaacaaaatcacactgtggaatagagaccttgctcctactccaggagccaacttgtatggttctcaccctttctacttggccctggaagatggcggatcagcgcatggcgtattcctcctgaattccaacgcaatggacgttgttcttcagccatctcctgctttgagttggagatctacaggcgggatactggacgtctacatctttctgggtccagagcctaaatccgtagtgcagcagtatcttgatgtcgtcggatacccgtttatgccaccatattggggcctggggttccacttgtgccgctggggatattcatccaccgccattacacgacaagttgttgagaatatgaccagggcacattttcctctggatgtacagtggaacgacctggactacatggatagtcgccgcgacttcaccttcaataaggatgggttcagagactttcctgctatggtccaagaacttcaccagggaggcaggaggtacatgatgatcgtagatccgggaatttcttcttctggcccagccggttcatacagaccgtatgacgaaggactgcgacgaggcgtctttatcacgaacgagactggtcagcctttgataggcaaggtttggccagggtccaccgctttcccggatttcacaaatcctgaggcactggcctggtgggaagatatggtcgccgagtttcacgaccaggtcccatttgacgggatgtggatcgacatgaacgagccatccaacttcattagaggaagtgtggatggctgtccgaataatgagctggaaaaccctccttacgtaccaggcgttgttggtgggactcttcaagctgcgacgatttgcgcatcctcccatcagttcctgtcaacccactataacttgcacaatctgtacgggaagacagaggctatcgccagtcatagggccctggtaaaagctagaggaacacgccctttcgttatctctcgctcaacttttgcaggccacggtaggtatgccggacattggaccggcgacgtctggagttcttgggaacagctggcttcctccgttccagagatattgcagtttaacctgttgggagtcccacttgtaggtgcagatgtttgtggcttcctggggaacacctcagaagaattgtgcgtaagatggactcaactgggcgccttctacccttttatgcgcaatcacaactcactgacatctttgcctcaagaaccgtactcatttagtgagccagcacagcaggccatgaggaaggctcttggcctgagatatgcacttctgccgcatctgtacacccttttccaccaggctcatgtccatggagagactgttgcacgacctctgttcttggagttcccaaaagactcttccacgtggacagtcgatcaccagatgctgtggggcgaggctctgctgattacacctgtattgcaacctggtaaggccgaagttaccgggtactttccattggggacctggtatgatctgcaaacagtcccggttgaagctcttggaagtcttccacctccacctgctgcaccaagggagcctgcgatccactctgaaggacagtgggtaactttgcctgcaccgctggacaccatcaatgtccatctgcgcgaaggctacatcataccacttcaaggtcctggactgaccactacagagtctagaaaacaaccaatggctcttgctgttgcactgactaaaagcggcgaagcaaggggtgagctgttctgggacgacggagagtcactggaggtactcgaacgaggcgcgtatacgcaggtcatttttgaggctcgcaataatacgatcgttaacgagctggtccacgtcacttcagaaggtgcaggccttcagttgggcaaggtaactgtcctgggagttgctacagcaccgcagcaggtcttgtccaacggacggcccgtaagcaactttacctatagtcctgataccaaagttctggacatctgcgttgctctgctgatgggtgagcagttcctggtatcatggtgc

SEQ ID NO: 142 - protein, 944 aa, synthetic construct
  REGION 1..944: note = Variant of the Homo Sapiens Lysosomal alpha-glucosidase
MEWSWVFLFFLSVTTGVHSGHILWHDFSTVPRELSGSSQVLEETHPAHQVGASRPGPRDAQLHPGRPRAVPTQCDVPENSRFDCAPEKAITQEQCEARGCCYIPAKQGLQGAQMGQPWCFFPPSYPSYKLENLSQSEMGYTATLTRTTPSFFPKDILTLRLDVMMETENRLHFTIKDPANRRYEVPLETPHVHSRAPSPLYSVEFSEEPFGVIVRRQLDGRVLLNTTVAPLFFADQFLQLSTSLPSQYITGLAEHLSPLMLSTSWNKITLWNRDLAPTPGANLYGSHPFYLALEDGGSAHGVFLLNSNAMDVVLQPSPALSWRSTGGILDVYIFLGPEPKSVVQQYLDVVGYPFMPPYWGLGFHLCRWGYSSTAITRQVVENMTRAHFPLDVQWNDLDYMDSRRDFTFNKDGFRDFPAMVQELHQGGRRYMMIVDPGISSSGPAGSYRPYDEGLRRGVFITNETGQPLIGKVWPGSTAFPDFTNPEALAWWEDMVAEFHDQVPFDGMWIDMNEPSNFIRGSVDGCPNNELENPPYVPGVVGGTLQAATICASSHQFLSTHYNLHNLYGKTEAIASHRALVKARGTRPFVISRSTFAGHGRYAGHWTGDVWSSWEQLASSVPEILQFNLLGVPLVGADVCGFLGNTSEELCVRWTQLGAFYPFMRNHNSLTSLPQEPYSFSEPAQQAMRKALGLRYALLPHLYTLFHQAHVHGETVARPLFLEFPKDSSTWTVDHQMLWGEALLITPVLQPGKAEVTGYFPLGTWYDLQTVPVEALGSLPPPPAAPREPAIHSEGQWVTLPAPLDTINVHLREGYIIPLQGPGLTTTESRKQPMALAVALTKSGEARGELFWDDGESLEVLERGAYTQVIFEARNNTIVNELVHVTSEGAGLQLGKVTVLGVATAPQQVLSNGRPVSNFTYSPDTKVLDICVALLMGEQFLVSWC

SEQ ID NO: 143 - DNA, 2832 bp, synthetic construct
  misc_feature 1..2832: note = Variant of the Homo Sapiens Lysosomal alpha-glucosidase
  source 1..2832: mol_type = other DNA
atggaatggagctgggtctttctcttcttcctgtcagtaacgactggtgtccactccggacacattctgagtcatgatttttctaccgtgcctagagagctttccggttcaagtcaagtcctcgaagaaacacatccagcccatcaggttggcgcatctaggccgggccctcgggacgctcaactccacccagggagacctagggccgttcccactcagtgcgacgtgccagagaactcacgcttcgattgtgcacctgagaaggctatcacgcaagagcagtgcgaggcccgcggatgttgttacataccggctaaacaggggctgcagggtgcgcagatgggccaaccttggtgcttcttcccaccatcctatccgagttacaagctggagaatctctcccagtctgaaatgggatataccgcaacactgactcggaccaccccctccttctttcccaaagatatcttgactctgagacttgacgtaatgatggagacagaaaacaggctccactttaccattaaggaccctgccaatcgccgatacgaggtgcctctggaaacaccacacgtgcacagtagagctccatcacctctgtattctgtcgagttctccgaagagccgtttggcgttatcgtcaggaggcagctcgacgggcgagtgcttctgaacacgactgtggccccgttgttctttgcggatcagtttctgcaactgtcaacaagtctcccttctcagtacattaccgggcttgcagagcatctgtccccactcatgctgagtacttcatggaacaaaatcacactgtggaatagagaccttgctcctactccaggagccaacttgtatggttctcaccctttctacttggccctggaagatggcggatcagcgcatggcgtattcctcctgaattccaacgcaatggacgttgttcttcagccatctcctgctttgagttggagatctacaggcgggatactggacgtctacatctttctgggtccagagcctaaatccgtagtgcagcagtatcttgatgtcgtcggatacccgtttatgccaccatattggggcctggggttccacttgtgccgctggggatattcatccaccgccattacacgacaagttgttgagaatatgaccagggcacattttcctctggatgtacagtggaacgacctggactacatggatagtcgccgcgacttcaccttcaataaggatgggttcagagactttcctgctatggtccaagaacttcaccagggaggcaggaggtacatgatgatcgtagatccgggaatttcttcttctggcccagccggttcatacagaccgtatgacgaaggactgcgacgaggcgtctttatcacgaacgagactggtcagcctttgataggcaaggtttggccagggtccaccgctttcccggatttcacaaatcctgaggcactggcctggtgggaagatatggtcgccgagtttcacgaccaggtcccatttgacgggatgtggatcgacatgaacgagccatccaacttcattagaggaagtgtggatggctgtccgaataatgagctggaaaaccctccttacgtaccaggcgttgttggtgggactcttcaagctgcgacgatttgcgcatcctcccatcagttcctgtcaacccactataacttgcacaatctgtacgggacaacagaggctatcgccagtcatagggccctggtaaaagctagaggaacacgccctttcgttatctctcgctcaacttttgcaggccacggtaggtatgccggacattggaccggcgacgtctggagttcttgggaacagctggcttcctccgttccagagatattgcagtttaacctgttgggagtcccacttgtaggtgcagatgtttgtggcttcctggggaacacctcagaagaattgtgcgtaagatggactcaactgggcgccttctacccttttatgcgcaatcacaactcactgacatctttgcctcaagaaccgtactcatttagtgagccagcacagcaggccatgaggaaggctcttggcctgagatatgcacttctgccgcatctgtacacccttttccaccaggctcatgtccatggagagactgttgcacgacctctgttcttggagttcccaaaagactcttccacgtggacagtcgatcaccagatgctgtggggcgaggctctgctgattacacctgtattgcaacctggtaaggccgaagttaccgggtactttccattggggacctggtatgatctgcaaacagtcccggttgaagctcttggaagtcttccacctccacctgctgcaccaagggagcctgcgatccactctgaaggacagtgggtaactttgcctgcaccgctggacaccatcaatgtccatctgcgcgaaggctacatcataccacttcaaggtcctggactgaccactacagagtctagaaaacaaccaatggctcttgctgttgcactgactaaaagcggcgaagcaaggggtgagctgttctgggacgacggagagtcactggaggtactcgaacgaggcgcgtatacgcaggtcatttttgaggctcgcaataatacgatcgttaacgagctggtccacgtcacttcagaaggtgcaggccttcagttgggcaaggtaactgtcctgggagttgctacagcaccgcagcaggtcttgtccaacggacggcccgtaagcaactttacctatagtcctgataccaaagttctggacatctgcgttgctctgctgatgggtgagcagttcctggtatcatggtgc

SEQ ID NO: 144 - protein, 944 aa, synthetic construct
  REGION 1..944: note = Variant of the Homo Sapiens Lysosomal alpha-glucosidase
MEWSWVFLFFLSVTTGVHSGHILSHDFSTVPRELSGSSQVLEETHPAHQVGASRPGPRDAQLHPGRPRAVPTQCDVPENSRFDCAPEKAITQEQCEARGCCYIPAKQGLQGAQMGQPWCFFPPSYPSYKLENLSQSEMGYTATLTRTTPSFFPKDILTLRLDVMMETENRLHFTIKDPANRRYEVPLETPHVHSRAPSPLYSVEFSEEPFGVIVRRQLDGRVLLNTTVAPLFFADQFLQLSTSLPSQYITGLAEHLSPLMLSTSWNKITLWNRDLAPTPGANLYGSHPFYLALEDGGSAHGVFLLNSNAMDVVLQPSPALSWRSTGGILDVYIFLGPEPKSVVQQYLDVVGYPFMPPYWGLGFHLCRWGYSSTAITRQVVENMTRAHFPLDVQWNDLDYMDSRRDFTFNKDGFRDFPAMVQELHQGGRRYMMIVDPGISSSGPAGSYRPYDEGLRRGVFITNETGQPLIGKVWPGSTAFPDFTNPEALAWWEDMVAEFHDQVPFDGMWIDMNEPSNFIRGSVDGCPNNELENPPYVPGVVGGTLQAATICASSHQFLSTHYNLHNLYGTTEAIASHRALVKARGTRPFVISRSTFAGHGRYAGHWTGDVWSSWEQLASSVPEILQFNLLGVPLVGADVCGFLGNTSEELCVRWTQLGAFYPFMRNHNSLTSLPQEPYSFSEPAQQAMRKALGLRYALLPHLYTLFHQAHVHGETVARPLFLEFPKDSSTWTVDHQMLWGEALLITPVLQPGKAEVTGYFPLGTWYDLQTVPVEALGSLPPPPAAPREPAIHSEGQWVTLPAPLDTINVHLREGYIIPLQGPGLTTTESRKQPMALAVALTKSGEARGELFWDDGESLEVLERGAYTQVIFEARNNTIVNELVHVTSEGAGLQLGKVTVLGVATAPQQVLSNGRPVSNFTYSPDTKVLDICVALLMGEQFLVSWC

SEQ ID NO: 145 - DNA, 2832 bp, synthetic construct
  misc_feature 1..2832: note = Variant of the Homo Sapiens Lysosomal alpha-glucosidase
  source 1..2832: mol_type = other DNA
atggaatggagctgggtctttctcttcttcctgtcagtaacgactggtgtccactccggacacattctgtggcatgatttttctaccgtgcctagagagctttccggttcaagtcaagtcctcgaagaaacacatccagcccatcaggttggcgcatctaggccgggccctcgggacgctcaactccacccagggagacctagggccgttcccactcagtgcgacgtgccagagaactcacgcttcgattgtgcacctgagaaggctatcacgcaagagcagtgcgaggcccgcggatgttgttacataccggctaaacaggggctgcagggtgcgcagatgggccaaccttggtgcttcttcccaccatcctatccgagttacaagctggagaatctctccttgtctgaaatgggatataccgcaacactgactcggaccaccccctccttctttcccaaagatatcttgactctgagacttgacgtaatgatggagacagaaaacaggctccactttaccattaaggaccctgccaatcgccgatacgaggtgcctctggaaacaccacacgtgcacagtagagctccatcacctctgtattctgtcgagttctccgaagagccgtttggcgttatcgtcaggaggcagctcgacgggcgagtgcttctgaacacgactgtggccccgttgttctttgcggatcagtttctgcaactgtcaacaagtctcccttctcagtacattaccgggcttgcagagcatctgtccccactcatgctgagtacttcatggaacaaaatcacactgtggaatagagaccttgctcctactccaggagccaacttgtatggttctcaccctttctacttggccctggaagatggcggatcagcgcatggcgtattcctcctgaattccaacgcaatggacgttgttcttcagccatctcctgctttgagttggagatctacaggcgggatactggacgtctacatctttctgggtccagagcctaaatccgtagtgcagcagtatcttgatgtcgtcggatacccgtttatgccaccatattggggcctggggttccacttgtgccgctggggatattcatccaccgccattacacgacaagttgttgagaatatgaccagggcacattttcctctggatgtacagtggaacgacctggactacatggatagtcgccgcgacttcaccttcaataaggatgggttcagagactttcctgctatggtccaagaacttcaccagggaggcaggaggtacatgatgatcgtagatccgggaatttcttcttctggcccagccggttcatacagaccgtatgacgaaggactgcgacgaggcgtctttatcacgaacgagactggtcagcctttgataggcaaggtttggccagggtccaccgctttcccggatttcacaaatcctgaggcactggcctggtgggaagatatggtcgccgagtttcacgaccaggtcccatttgacgggatgtggatcgacatgaacgagccatccaacttcattagaggaagtgtggatggctgtccgaataatgagctggaaaaccctccttacgtaccaggcgttgttggtgggactcttcaagctgcgacgatttgcgcatcctcccatcagttcctgtcaacccactataacttgcacaatctgtacgggacaacagaggctatcgccagtcatagggccctggtaaaagctagaggaacacgccctttcgttatctctcgctcaacttttgcaggccacggtaggtatgccggacattggaccggcgacgtctggagttcttgggaacagctggcttcctccgttccagagatattgcagtttaacctgttgggagtcccacttgtaggtgcagatgtttgtggcttcctggggaacacctcagaagaattgtgcgtaagatggactcaactgggcgccttctacccttttatgcgcaatcacaactcactgacatctttgcctcaagaaccgtactcatttagtgagccagcacagcaggccatgaggaaggctcttggcctgagatatgcacttctgccgcatctgtacacccttttccaccaggctcatgtccatggagagactgttgcacgacctctgttcttggagttcccaaaagactcttccacgtggacagtcgatcaccagatgctgtggggcgaggctctgctgattacacctgtattgcaacctggtaaggccgaagttaccgggtactttccattggggacctggtatgatctgcaaacagtcccggttgaagctcttggaagtcttccacctccacctgctgcaccaagggagcctgcgatccactctgaaggacagtgggtaactttgcctgcaccgctggacaccatcaatgtccatctgcgcgaaggctacatcataccacttcaaggtcctggactgaccactacagagtctagaaaacaaccaatggctcttgctgttgcactgactaaaagcggcgaagcaaggggtgagctgttctgggacgacggagagtcactggaggtactcgaacgaggcgcgtatacgcaggtcatttttgaggctcgcaataatacgatcgttaacgagctggtccacgtcacttcagaaggtgcaggccttcagttgggcaaggtaactgtcctgggagttgctacagcaccgcagcaggtcttgtccaacggacggcccgtaagcaactttacctatagtcctgataccaaagttctggacatctgcgttgctctgctgatgggtgagcagttcctggtatcatggtgc

SEQ ID NO: 146 - protein, 944 aa, synthetic construct
  REGION 1..944: note = Variant of the Homo Sapiens Lysosomal alpha-glucosidase
MEWSWVFLFFLSVTTGVHSGHILWHDFSTVPRELSGSSQVLEETHPAHQVGASRPGPRDAQLHPGRPRAVPTQCDVPENSRFDCAPEKAITQEQCEARGCCYIPAKQGLQGAQMGQPWCFFPPSYPSYKLENLSLSEMGYTATLTRTTPSFFPKDILTLRLDVMMETENRLHFTIKDPANRRYEVPLETPHVHSRAPSPLYSVEFSEEPFGVIVRRQLDGRVLLNTTVAPLFFADQFLQLSTSLPSQYITGLAEHLSPLMLSTSWNKITLWNRDLAPTPGANLYGSHPFYLALEDGGSAHGVFLLNSNAMDVVLQPSPALSWRSTGGILDVYIFLGPEPKSVVQQYLDVVGYPFMPPYWGLGFHLCRWGYSSTAITRQVVENMTRAHFPLDVQWNDLDYMDSRRDFTFNKDGFRDFPAMVQELHQGGRRYMMIVDPGISSSGPAGSYRPYDEGLRRGVFITNETGQPLIGKVWPGSTAFPDFTNPEALAWWEDMVAEFHDQVPFDGMWIDMNEPSNFIRGSVDGCPNNELENPPYVPGVVGGTLQAATICASSHQFLSTHYNLHNLYGTTEAIASHRALVKARGTRPFVISRSTFAGHGRYAGHWTGDVWSSWEQLASSVPEILQFNLLGVPLVGADVCGFLGNTSEELCVRWTQLGAFYPFMRNHNSLTSLPQEPYSFSEPAQQAMRKALGLRYALLPHLYTLFHQAHVHGETVARPLFLEFPKDSSTWTVDHQMLWGEALLITPVLQPGKAEVTGYFPLGTWYDLQTVPVEALGSLPPPPAAPREPAIHSEGQWVTLPAPLDTINVHLREGYIIPLQGPGLTTTESRKQPMALAVALTKSGEARGELFWDDGESLEVLERGAYTQVIFEARNNTIVNELVHVTSEGAGLQLGKVTVLGVATAPQQVLSNGRPVSNFTYSPDTKVLDICVALLMGEQFLVSWC

SEQ ID NO: 147 - DNA, 2832 bp, synthetic construct
  misc_feature 1..2832: note = Variant of the Homo Sapiens Lysosomal alpha-glucosidase
  source 1..2832: mol_type = other DNA
atggaatggagctgggtctttctcttcttcctgtcagtaacgactggtgtccactccggacacattctgtggcatgatttttctaccgtgcctagagagctttccggttcaagtcaagtcctcgaagaaacacatccagcccatcaggttggcgcatctaggccgggccctcgggacgctcaactccacccagggagacctagggccgttcccactcagtgcgacgtgccagagaactcacgcttcgattgtgcacctgagaaggctatcacgcaagagcagtgcgaggcccgcggatgttgttacataccggctaaacaggggctgcagggtgcgcagatgggccaaccttggtgcttcttcccaccatcctatccgagttacaagctggagaatctctcccagtctgaaatgggatataccgcaacactgactcggaccaccccctccttctttcccaaagatatcttgactctgagacttgacgtaatgatggagacagaaaacaggctccactttaccattaaggaccctgccaatcgccgatacgaggtgcctctggaaacaccacacgtgcacagtagagctccatcacctctgtattctgtcgagttctccgaagagccgtttggcgttatcgtcaggaggcagctcgacgggcgagtgcttctgaacacgactgtggccccgttgttctttgcggatcagtttctgcaactgtcaacaagtctcccttctcagtacattaccgggcttgcagagcatctgtccccactcatgctgagtacttcatggaacaaaatcacactgtggaatagagaccttgctcctactccaggagccaacttgtatggttctcaccctttctacttggccctggaagatggcggatcagcgcatggcgtattcctcctgaattccaacgcaatggacgttgttcttcagccatctcctgctttgagttggagatctacaggcgggatactggacgtctacatctttctgggtccagagcctaaatccgtagtgcagcagtatcttgatgtcgtcggatacccgtttatgccaccatattggggcctggggttccacttgtgccgctggggatattcatccaccgccattacacgacaagttgttgagaatatgaccagggcacattttcctctggatgtacagtggaacgacctggactacatggatagtcgccgcgacttcaccttcaataaggatgggttcagagactttcctgctatggtccaagaacttcaccagggaggcaggaggtacatgatgatcgtagatccgggaatttcttcttctggcccagccggttcatacagaccgtatgacgaaggactgcgacgaggcgtctttatcacgaacgagactggtcagcctttgataggcaaggtttggccagggtccaccgctttcccggatttcacaaatcctgaggcactggcctggtgggaagatatggtcgccgagtttcacgaccaggtcccatttgacgggatgtggatcgacatgaacgagccatccaacttcattagaggaagtgtggatggctgtccgaataatgagctggaaaaccctccttacgtaccaggcgttgttggtgggactcttcaagctgcgacgatttgcgcatcctcccatcagttcctgtcaacccactataacttgcacaatctgtacgggacaacagaggctatcgccagtcatagggccctggtaaaagctagaggaacacgccctttcgttatctctcgctcaacttttgcaggccacggtaggtatgccggacattggaccggcgacgtctggagttcttgggaacagctggcttcctccgttccagagatattgcagtttaacctgttgggagtcccacttgtaggtgcagatgtttgtggcttcctggggaacacctcagaagaattgtgcgtaagatggactcaactgggcgccttctacccttttatgcgcaatcacaactcactgacatctttgcctcaagaaccgtactcatttagtgagccagcacagcaggccatgaggaaggctcttggcctgagatatgcacttctgccgcatctgtacacccttttccaccaggctcatgtccatggagagactgttgcacgacctctgttcttggagttcccaaaagactcttccacgtggacagtcgatcaccagatgctgtggggcgaggctctgctgattacacctgtattgcaacctggtaaggccgaagttaccgggtactttccattggggacctggtatgatctgcaaacagtcccggttgaagctcttggaagtcttccacctccacctgctgcaccaagggagcctgcgatccactctgaaggacagtgggtaactttgcctgcaccgctggacaccatcaatgtccatctgcgcgaaggctacatcataccacttcaaggtcctggactgaccactacagagtctagaaaacaaccaatggctcttgctgttgcactgactaaaaggggcgaagcaaggggtgagctgttctgggacgacggagagtcactggaggtactcgaacgaggcgcgtatacgcaggtcatttttgaggctcgcaataatacgatcgttaacgagctggtccacgtcacttcagaaggtgcaggccttcagttgggcaaggtaactgtcctgggagttgctacagcaccgcagcaggtcttgtccaacggacggcccgtaagcaactttacctatagtcctgataccaaagttctggacatctgcgttgctctgctgatgggtgagcagttcctggtatcatggtgc

SEQ ID NO: 148 - protein, 944 aa, synthetic construct
  REGION 1..944: note = Variant of the Homo Sapiens Lysosomal alpha-glucosidase
MEWSWVFLFFLSVTTGVHSGHILWHDFSTVPRELSGSSQVLEETHPAHQVGASRPGPRDAQLHPGRPRAVPTQCDVPENSRFDCAPEKAITQEQCEARGCCYIPAKQGLQGAQMGQPWCFFPPSYPSYKLENLSQSEMGYTATLTRTTPSFFPKDILTLRLDVMMETENRLHFTIKDPANRRYEVPLETPHVHSRAPSPLYSVEFSEEPFGVIVRRQLDGRVLLNTTVAPLFFADQFLQLSTSLPSQYITGLAEHLSPLMLSTSWNKITLWNRDLAPTPGANLYGSHPFYLALEDGGSAHGVFLLNSNAMDVVLQPSPALSWRSTGGILDVYIFLGPEPKSVVQQYLDVVGYPFMPPYWGLGFHLCRWGYSSTAITRQVVENMTRAHFPLDVQWNDLDYMDSRRDFTFNKDGFRDFPAMVQELHQGGRRYMMIVDPGISSSGPAGSYRPYDEGLRRGVFITNETGQPLIGKVWPGSTAFPDFTNPEALAWWEDMVAEFHDQVPFDGMWIDMNEPSNFIRGSVDGCPNNELENPPYVPGVVGGTLQAATICASSHQFLSTHYNLHNLYGTTEAIASHRALVKARGTRPFVISRSTFAGHGRYAGHWTGDVWSSWEQLASSVPEILQFNLLGVPLVGADVCGFLGNTSEELCVRWTQLGAFYPFMRNHNSLTSLPQEPYSFSEPAQQAMRKALGLRYALLPHLYTLFHQAHVHGETVARPLFLEFPKDSSTWTVDHQMLWGEALLITPVLQPGKAEVTGYFPLGTWYDLQTVPVEALGSLPPPPAAPREPAIHSEGQWVTLPAPLDTINVHLREGYIIPLQGPGLTTTESRKQPMALAVALTKRGEARGELFWDDGESLEVLERGAYTQVIFEARNNTIVNELVHVTSEGAGLQLGKVTVLGVATAPQQVLSNGRPVSNFTYSPDTKVLDICVALLMGEQFLVSWC

SEQ ID NO: 149 - DNA, 2832 bp, synthetic construct
  misc_feature 1..2832: note = Variant of the Homo Sapiens Lysosomal alpha-glucosidase
  source 1..2832: mol_type = other DNA
atggaatggagctgggtctttctcttcttcctgtcagtaacgactggtgtccactccggacacattctgtggcatgatttttctaccgtgcctagagagctttccggttcaagtcaagtcctcgaagaaacacatccagcccatcaggttggcgcatctaggccgggccctcgggacgctcaactccacccagggagacctagggccgttcccactcagtgcgacgtgccagagaactcacgcttcgattgtgcacctgagaaggctatcacgcaagagcagtgcgaggcccgcggatgttgttacataccggctaaacaggggctgcagggtgcgcagatgggccaaccttggtgcttcttcccaccatcctatccgagttacaagctggagaatctctcccagtctgaaatgggatataccgcaacactgactcggaccaccccctccttctttcccaaagatatcttgactctgagacttgacgtaatgatggagacagaaaacaggctccactttaccattaaggaccctgccaatcgccgatacgaggtgcctctggaaacaccacacgtgcacagtagagctccatcacctctgtattctgtcgagttctccgaagagccgtttggcgttatcgtcaggaggcagctcgacgggcgagtgcttctgaacacgactgtggccccgttgttctttgcggatcagtttctgcaactgtcaacaagtctcccttctcagtacattaccgggcttgcagagcatctgtccccactcatgctgagtacttcatggaacaaaatcacactgtggaatagagaccttgctcctactccaggagccaacttgtatggttctcaccctttctacttggccctggaagatggcggatcagcgcatggcgtattcctcctgaattccaacgcaatggacgttgttcttcagccatctcctgctttgagttggagatctacaggcgggatactggacgtctacatctttctgggtccagagcctaaatccgtagtgcagcagtatcttgatgtcgtcggatacccgtttatgccaccatattggggcctggggttccacttgtgccgctggggatattcatccaccgccattacacgacaagttgttgagaatatgaccagggcacattttcctctggatgtacagtggaacgacctggactacatggatagtcgccgcgacttcaccttcaataaggatgggttcagagactttcctgctatggtccaagaacttcaccagggaggcaggaggtacatgatgatcgtagatccgggaatttcttcttctggcccagccggttcatacagaccgtatgacgaaggactgcgacgaggcgtctttatcacgaacgagactggtcagcctttgataggcaaggtttggccagggtccaccgctttcccggatttcacaaatcctgaggcactggcctggtgggaagatatggtcgccgagtttcacgaccaggtcccatttgacgggatgtggatcgacatgaacgagccatccaacttcattagaggaagtgtggatggctgtccgaataatgagctggaaaaccctccttacgtaccaggcgttgttggtgggactcttcaagctgcgacgatttgcgcatcctcccatcagttcctgtcaacccactataacttgcacaatctgtacgggacaacagaggctatcgccagtcatagggccctggtaaaagctagaggaacacgccctttcgttatctctcgctcaacttttgcaggccacggtaggtatgccggacattggaccggcgacgtctggagttcttgggaacagctggcttcctccgttccagagatattgcagtttaacctgttgggagtcccacttgtaggtgcagatgtttgtggcttcctggggaacacctcagaagaattgtgcgtaagatggactcaactgggcgccttctacccttttatgcgcaatcacaactcactgacatctttgcctcaagaaccgtactcatttagtgagccagcacagcaggccatgaggaaggctcttggcctgagatatgcacttctgccgcatctgtacacccttttccaccaggctcatgtccatggagagactgttgcacgacctctgttcttggagttcccaaaagactcttccacgtggacagtcgatcaccagatgctgtggggcgaggctctgctgattacacctgtattgcaacctggtaaggccgaagttaccgggtactttccattggggacctggtatgatctgcaaacagtcccggttgaagctcttggaagtcttccacctccacctgctgcaccaagggagcctgcgatccactctgaaggacagtgggtaactttgcctgcaccgctggacaccatcaatgtccatctgcgcgaaggctacatcataccacttcaaggtcctggactgaccactacagagtctagaaaacaaccaatggctcttgctgttgcactgactaaaagcggcgaagcaaggggtgagctgttctgggacgacggagagtcactggaggtactcgaacgaggcgcgtatacgcaggtcatttttgaggctcgcaataatacgatcgttaacgagctggtccacgtcacttcagaaggtgcaggccttcagttgtataaggtaactgtcctgggagttgctacagcaccgcagcaggtcttgtccaacggacggcccgtaagcaactttacctatagtcctgataccaaagttctggacatctgcgttgctctgctgatgggtgagcagttcctggtatcatggtgc

SEQ ID NO: 150 - protein, 944 aa, synthetic construct
  REGION 1..944: note = Variant of the Homo Sapiens Lysosomal alpha-glucosidase
MEWSWVFLFFLSVTTGVHSGHILWHDFSTVPRELSGSSQVLEETHPAHQVGASRPGPRDAQLHPGRPRAVPTQCDVPENSRFDCAPEKAITQEQCEARGCCYIPAKQGLQGAQMGQPWCFFPPSYPSYKLENLSQSEMGYTATLTRTTPSFFPKDILTLRLDVMMETENRLHFTIKDPANRRYEVPLETPHVHSRAPSPLYSVEFSEEPFGVIVRRQLDGRVLLNTTVAPLFFADQFLQLSTSLPSQYITGLAEHLSPLMLSTSWNKITLWNRDLAPTPGANLYGSHPFYLALEDGGSAHGVFLLNSNAMDVVLQPSPALSWRSTGGILDVYIFLGPEPKSVVQQYLDVVGYPFMPPYWGLGFHLCRWGYSSTAITRQVVENMTRAHFPLDVQWNDLDYMDSRRDFTFNKDGFRDFPAMVQELHQGGRRYMMIVDPGISSSGPAGSYRPYDEGLRRGVFITNETGQPLIGKVWPGSTAFPDFTNPEALAWWEDMVAEFHDQVPFDGMWIDMNEPSNFIRGSVDGCPNNELENPPYVPGVVGGTLQAATICASSHQFLSTHYNLHNLYGTTEAIASHRALVKARGTRPFVISRSTFAGHGRYAGHWTGDVWSSWEQLASSVPEILQFNLLGVPLVGADVCGFLGNTSEELCVRWTQLGAFYPFMRNHNSLTSLPQEPYSFSEPAQQAMRKALGLRYALLPHLYTLFHQAHVHGETVARPLFLEFPKDSSTWTVDHQMLWGEALLITPVLQPGKAEVTGYFPLGTWYDLQTVPVEALGSLPPPPAAPREPAIHSEGQWVTLPAPLDTINVHLREGYIIPLQGPGLTTTESRKQPMALAVALTKSGEARGELFWDDGESLEVLERGAYTQVIFEARNNTIVNELVHVTSEGAGLQLYKVTVLGVATAPQQVLSNGRPVSNFTYSPDTKVLDICVALLMGEQFLVSWC

SEQ ID NO: 151 - DNA, 2832 bp, synthetic construct
  misc_feature 1..2832: note = Variant of the Homo Sapiens Lysosomal alpha-glucosidase
  source 1..2832: mol_type = other DNA
atggaatggagctgggtctttctcttcttcctgtcagtaacgactggtgtccactccggacacattctgtggcatgatttttctaccgtgcctagagagctttccggttcaagtcaagtcctcgaagaaacacatccagcccatcaggttggcgcatctaggccgggccctcgggacgctcaactccacccagggagacctagggccgttcccactcagtgcgacgtgccagagaactcacgcttcgattgtgcacctgagaaggctatcacgcaagagcagtgcgaggcccgcggatgttgttacataccggctaaacaggggctgcagggtgcgcagatgggccaaccttggtgcttcttcccaccatcctatccgagttacaagctggagaatctctcccagtctgaaatgggatataccgcaacactgactcggaccaccccctccttctttcccaaagatatcttgactctgagacttgacgtaatgatggagacagaaaacaggctccactttaccattaaggaccctgccaatcgccgatacgaggtgcctctggaaacaccacacgtgcacagtagagctccatcacctctgtattctgtcgagttctccgaagagccgtttggcgttatcgtcaggaggcagctcgacgggcgagtgcttctgaacacgactgtggccccgttgttctttgcggatcagtttctgcaactgtcaacaagtctcccttctcagtacattaccgggcttgcagagcatctgtccccactcatgctgagtacttcatggaacaaaatcacactgtggaatagagaccttgctcctactccaggagccaacttgtatggttctcaccctttctacttggccctggaagatggcggatcagcgcatggcgtattcctcctgaattccaacgcaatggacgttgttcttcagccatctcctgctttgagttggagatctacaggcgggatactggacgtctacatctttctgggtccagagcctaaatccgtagtgcagcagtatcttgatgtcgtcggatacccgtttatgccaccatattggggcctggggttccacttgtgccgctggggatattcatccaccgccattacacgacaagttgttgagaatatgaccagggcacattttcctctggatgtacagtggaacgacctggactacatggatagtcgccgcgacttcaccttcaataaggatgggttcagagactttcctgctatggtccaagaacttcaccagggaggcaggaggtacatgatgatcgtagatccgggaatttcttcttctggcccagccggttcatacagaccgtatgacgaaggactgcgacgaggcgtctttatcacgaacgagactggtcagcctttgataggcaaggtttggccagggtccaccgctttcccggatttcacaaatcctgaggcactggcctggtgggaagatatggtcgccgagtttcacgaccaggtcccatttgacgggatgtggatcgacatgaacgagccatccaacttcattagaggaagtgtggatggctgtccgaataatgagctggaaaaccctccttacgtaccaggcgttgttggtgggactcttcaagctgcgacgatttgcgcatcctcccatcagttcctgtcaacccactataacttgcacaatctgtacgggacaacagaggctatcgccagtcatagggccctggtaaaagctagaggaacacgccctttcgttatctctcgctcaacttttgcaggccacggtaggtatgccggacattggaccggcgacgtctggagttcttgggaacagctggcttcctccgttccagagatattgcagtttaacctgttgggagtcccacttgtaggtgcagatgtttgtggcttcctggggaacacctcagaagaattgtgcgtaagatggactcaactgggcgccttctacccttttatgcgcaatcacaactcactgacatctttgcctcaagaaccgtactcatttagtgagccagcacagcaggccatgaggaaggctcttggcctgagatatgcacttctgccgcatctgtacacccttttccaccaggctcatgtccatggagagactgttgcacgacctctgttcttggagttcccaaaagactcttccacgtggacagtcgatcaccagatgctgtggggcgaggctctgctgattacacctgtattgcaacctggtaaggccgaagttaccgggtactttccattggggacctggtatgatctgcaaacagtcccggttgaagctcttggaagtcttccacctccacctgctgcaccaagggagcctgcgatccactctgaaggacagtgggtaactttgcctgcaccgctggacaccatcaatgtccatctgcgcgaaggctacatcataccacttcaaggtcctggactgaccactacagagtctagaaaacaaccaatggctcttgctgttgcactgactaaaacgggcgaagcaaggggtgagctgttctgggacgacggagagtcactggaggtactcgaacgaggcgcgtatacgcaggtcatttttgaggctcgcaataatacgatcgttaacgagctggtccacgtcacttcagaaggtgcaggccttcagttgggcaaggtaactgtcctgggagttgctacagcaccgcagcaggtcttgtccaacggacggcccgtaagcaactttacctatagtcctgataccaaagttctggacatctgcgttgctctgctgatgggtgagcagttcctggtatcatggtgc

SEQ ID NO: 152 - protein, 944 aa, synthetic construct
  REGION 1..944: note = Variant of the Homo Sapiens Lysosomal alpha-glucosidase
MEWSWVFLFFLSVTTGVHSGHILWHDFSTVPRELSGSSQVLEETHPAHQVGASRPGPRDAQLHPGRPRAVPTQCDVPENSRFDCAPEKAITQEQCEARGCCYIPAKQGLQGAQMGQPWCFFPPSYPSYKLENLSQSEMGYTATLTRTTPSFFPKDILTLRLDVMMETENRLHFTIKDPANRRYEVPLETPHVHSRAPSPLYSVEFSEEPFGVIVRRQLDGRVLLNTTVAPLFFADQFLQLSTSLPSQYITGLAEHLSPLMLSTSWNKITLWNRDLAPTPGANLYGSHPFYLALEDGGSAHGVFLLNSNAMDVVLQPSPALSWRSTGGILDVYIFLGPEPKSVVQQYLDVVGYPFMPPYWGLGFHLCRWGYSSTAITRQVVENMTRAHFPLDVQWNDLDYMDSRRDFTFNKDGFRDFPAMVQELHQGGRRYMMIVDPGISSSGPAGSYRPYDEGLRRGVFITNETGQPLIGKVWPGSTAFPDFTNPEALAWWEDMVAEFHDQVPFDGMWIDMNEPSNFIRGSVDGCPNNELENPPYVPGVVGGTLQAATICASSHQFLSTHYNLHNLYGTTEAIASHRALVKARGTRPFVISRSTFAGHGRYAGHWTGDVWSSWEQLASSVPEILQFNLLGVPLVGADVCGFLGNTSEELCVRWTQLGAFYPFMRNHNSLTSLPQEPYSFSEPAQQAMRKALGLRYALLPHLYTLFHQAHVHGETVARPLFLEFPKDSSTWTVDHQMLWGEALLITPVLQPGKAEVTGYFPLGTWYDLQTVPVEALGSLPPPPAAPREPAIHSEGQWVTLPAPLDTINVHLREGYIIPLQGPGLTTTESRKQPMALAVALTKTGEARGELFWDDGESLEVLERGAYTQVIFEARNNTIVNELVHVTSEGAGLQLGKVTVLGVATAPQQVLSNGRPVSNFTYSPDTKVLDICVALLMGEQFLVSWC

SEQ ID NO: 153 - DNA, 2832 bp, synthetic construct
  misc_feature 1..2832: note = Variant of the Homo Sapiens Lysosomal alpha-glucosidase
  source 1..2832: mol_type = other DNA
atggaatggagctgggtctttctcttcttcctgtcagtaacgactggtgtccactccggacacattctgtggcatgatttttctaccgtgcctagagagctttccggttcaagtcaagtcctcgaagaaacacatccagcccatcaggttggcgcatctaggccgggccctcgggacgctcaactccacccagggagacctagggccgttcccactcagtgcgacgtgccagagaactcacgcttcgattgtgcacctgagaaggctatcacgcaagagcagtgcgaggcccgcggatgttgttacataccggctaaacaggggctgcagggtgcgcagatgggccaaccttggtgcttcttcccaccatcctatccgagttacaagctggagaatctctcccagtctgaaatgggatataccgcaacactgactcggaccaccccctccttctttcccaaagatatcttgactctgagacttgacgtaatgatggagacagaaaacaggctccactttaccattaaggaccctgccaatcgccgatacgaggtgcctctggaaacaccacacgtgcacagtagagctccatcacctctgtattctgtcgagttctccgaagagccgtttggcgttatcgtcaggaggcagctcgacgggcgagtgcttctgaacacgactgtggccccgttgttctttgcggatcagtttctgcaactgtcaacaagtctcccttctcagtacattaccgggcttgcagagcatctgtccccactcatgctgagtacttcatggaacaaaatcacactgtggaatagagaccttgctcctactccaggagccaacttgtatggttctcaccctttctacttggccctggaagatggcggatcagcgcatggcgtattcctcctgaattccaacgcaatggacgttgttcttcagccatctcctgctttgagttggagatctacaggcgggatactggacgtctacatctttctgggtccagagcctaaatccgtagtgcagcagtatcttgatgtcgtcggatacccgtttatgccaccatattggggcctggggttccacttgtgccgctggggatattcatccaccgccattacacgacaagttgttgagaatatgaccagggcacattttcctctggatgtacagtggaacgacctggactacatggatagtcgccgcgacttcaccttcaataaggatgggttcagagactttcctgctatggtccaagaacttcaccagggaggcaggaggtacatgatgatcgtagatccgggaatttcttcttctggcccagccggttcatacagaccgtatgacgaaggactgcgacgaggcgtctttatcacgaacgagactggtcagcctttgataggcaaggtttggccagggtccaccgctttcccggatttcacaaatcctgaggcactggcctggtgggaagatatggtcgccgagtttcacgaccaggtcccatttgacgggatgtggatcgacatgaacgagccatccaacttcattagaggaagtgtggatggctgtccgaataatgagctggaaaaccctccttacgtaccaggcgttgttggtgggactcttcaagctgcgacgatttgcgcatcctcccatcagttcctgtcaacccactataacttgcacaatctgtacgggacaacagaggctatcgccagtcatagggccctggtaaaagctagaggaacacgccctttcgttatctctcgctcaacttttgcaggccacggtaggtatgccggacattggaccggcgacgtctggagttcttgggaacagctggcttcctccgttccagagatattgcagtttaacctgttgggagtcccacttgtaggtgcagatgtttgtggcttcctggggaacacctcagaagaattgtgcgtaagatggactcaactgggcgccttctacccttttatgcgcaatcacaactcactgacatctttgcctcaagaaccgtactcatttagtgagccagcacagcaggccatgaggaaggctcttggcctgagatatgcacttctgccgcatctgtacacccttttccaccaggctcatgtccatggagagactgttgcacgacctctgttcttggagttcccaaaagactcttccacgtggacagtcgatcaccagatgctgtggggcgaggctctgctgattacacctgtattgcaacctggtaaggccgaagttaccgggtactttccattggggacctggtatgatctgcaaacagtcccggttgaagctcttggaagtcttccacctccacctgctgcaccaagggagcctgcgatccactctgaaggacagtgggtaactttgcctgcaccgctggacaccatcaatgtccatctgcgcgaaggctacatcataccacttcaaggtcctggactgaccactacagagtctagaaaacaaccaatggctcttgctgttgcactgactaaaagcggcgaagcaaggggtgagctgttctgggacgacggagagtcactggaggtactcgaacgaggcgcgtatacgcaggtcatttttgaggctcgcaataatacgatcgttaacgagctggtccacgtcacttcagaaggtgcaggccttcagttgactaaggtaactgtcctgggagttgctacagcaccgcagcaggtcttgtccaacggacggcccgtaagcaactttacctatagtcctgataccaaagttctggacatctgcgttgctctgctgatgggtgagcagttcctggtatcatggtgc

SEQ ID NO: 154 - protein, 944 aa, synthetic construct
  REGION 1..944: note = Variant of the Homo Sapiens Lysosomal alpha-glucosidase
MEWSWVFLFFLSVTTGVHSGHILWHDFSTVPRELSGSSQVLEETHPAHQVGASRPGPRDAQLHPGRPRAVPTQCDVPENSRFDCAPEKAITQEQCEARGCCYIPAKQGLQGAQMGQPWCFFPPSYPSYKLENLSQSEMGYTATLTRTTPSFFPKDILTLRLDVMMETENRLHFTIKDPANRRYEVPLETPHVHSRAPSPLYSVEFSEEPFGVIVRRQLDGRVLLNTTVAPLFFADQFLQLSTSLPSQYITGLAEHLSPLMLSTSWNKITLWNRDLAPTPGANLYGSHPFYLALEDGGSAHGVFLLNSNAMDVVLQPSPALSWRSTGGILDVYIFLGPEPKSVVQQYLDVVGYPFMPPYWGLGFHLCRWGYSSTAITRQVVENMTRAHFPLDVQWNDLDYMDSRRDFTFNKDGFRDFPAMVQELHQGGRRYMMIVDPGISSSGPAGSYRPYDEGLRRGVFITNETGQPLIGKVWPGSTAFPDFTNPEALAWWEDMVAEFHDQVPFDGMWIDMNEPSNFIRGSVDGCPNNELENPPYVPGVVGGTLQAATICASSHQFLSTHYNLHNLYGTTEAIASHRALVKARGTRPFVISRSTFAGHGRYAGHWTGDVWSSWEQLASSVPEILQFNLLGVPLVGADVCGFLGNTSEELCVRWTQLGAFYPFMRNHNSLTSLPQEPYSFSEPAQQAMRKALGLRYALLPHLYTLFHQAHVHGETVARPLFLEFPKDSSTWTVDHQMLWGEALLITPVLQPGKAEVTGYFPLGTWYDLQTVPVEALGSLPPPPAAPREPAIHSEGQWVTLPAPLDTINVHLREGYIIPLQGPGLTTTESRKQPMALAVALTKSGEARGELFWDDGESLEVLERGAYTQVIFEARNNTIVNELVHVTSEGAGLQLTKVTVLGVATAPQQVLSNGRPVSNFTYSPDTKVLDICVALLMGEQFLVSWC

SEQ ID NO: 155 - DNA, 2832 bp, synthetic construct
  misc_feature 1..2832: note = Variant of the Homo Sapiens Lysosomal alpha-glucosidase
  source 1..2832: mol_type = other DNA
atggaatggagctgggtctttctcttcttcctgtcagtaacgactggtgtccactccggacacattctgtggcatgattttcagaccgtgcctagagagctttccggttcaagtcaagtcctcgaagaaacacatccagcccatcaggttggcgcatctaggccgggccctcgggacgctcaactccacccagggagacctagggccgttcccactcagtgcgacgtgccagagaactcacgcttcgattgtgcacctgagaaggctatcacgcaagagcagtgcgaggcccgcggatgttgttacataccggctaaacaggggctgcagggtgcgcagatgggccaaccttggtgcttcttcccaccatcctatccgagttacaagctggagaatctctcccagtctgaaatgggatataccgcaacactgactcggaccaccccctccttctttcccaaagatatcttgactctgagacttgacgtaatgatggagacagaaaacaggctccactttaccattaaggaccctgccaatcgccgatacgaggtgcctctggaaacaccacacgtgcacagtagagctccatcacctctgtattctgtcgagttctccgaagagccgtttggcgttatcgtcaggaggcagctcgacgggcgagtgcttctgaacacgactgtggccccgttgttctttgcggatcagtttctgcaactgtcaacaagtctcccttctcagtacattaccgggcttgcagagcatctgtccccactcatgctgagtacttcatggaacaaaatcacactgtggaatagagaccttgctcctactccaggagccaacttgtatggttctcaccctttctacttggccctggaagatggcggatcagcgcatggcgtattcctcctgaattccaacgcaatggacgttgttcttcagccatctcctgctttgagttggagatctacaggcgggatactggacgtctacatctttctgggtccagagcctaaatccgtagtgcagcagtatcttgatgtcgtcggatacccgtttatgccaccatattggggcctggggttccacttgtgccgctggggatattcatccaccgccattacacgacaagttgttgagaatatgaccagggcacattttcctctggatgtacagtggaacgacctggactacatggatagtcgccgcgacttcaccttcaataaggatgggttcagagactttcctgctatggtccaagaacttcaccagggaggcaggaggtacatgatgatcgtagatccgggaatttcttcttctggcccagccggttcatacagaccgtatgacgaaggactgcgacgaggcgtctttatcacgaacgagactggtcagcctttgataggcaaggtttggccagggtccaccgctttcccggatttcacaaatcctgaggcactggcctggtgggaagatatggtcgccgagtttcacgaccaggtcccatttgacgggatgtggatcgacatgaacgagccatccaacttcattagaggaagtgtggatggctgtccgaataatgagctggaaaaccctccttacgtaccaggcgttgttggtgggactcttcaagctgcgacgatttgcgcatcctcccatcagttcctgtcaacccactataacttgcacaatctgtacgggacaacagaggctatcgccagtcatagggccctggtaaaagctagaggaacacgccctttcgttatctctcgctcaacttttgcaggccacggtaggtatgccggacattggaccggcgacgtctggagttcttgggaacagctggcttcctccgttccagagatattgcagtttaacctgttgggagtcccacttgtaggtgcagatgtttgtggcttcctggggaacacctcagaagaattgtgcgtaagatggactcaactgggcgccttctacccttttatgcgcaatcacaactcactgacatctttgcctcaagaaccgtactcatttagtgagccagcacagcaggccatgaggaaggctcttggcctgagatatgcacttctgccgcatctgtacacccttttccaccaggctcatgtccatggagagactgttgcacgacctctgttcttggagttcccaaaagactcttccacgtggacagtcgatcaccagatgctgtggggcgaggctctgctgattacacctgtattgcaacctggtaaggccgaagttaccgggtactttccattggggacctggtatgatctgcaaacagtcccggttgaagctcttggaagtcttccacctccacctgctgcaccaagggagcctgcgatccactctgaaggacagtgggtaactttgcctgcaccgctggacaccatcaatgtccatctgcgcgaaggctacatcataccacttcaaggtcctggactgaccactacagagtctagaaaacaaccaatggctcttgctgttgcactgactaaaagcggcgaagcaaggggtgagctgttctgggacgacggagagtcactggaggtactcgaacgaggcgcgtatacgcaggtcatttttgaggctcgcaataatacgatcgttaacgagctggtccacgtcacttcagaaggtgcaggccttcagttgggcaaggtaactgtcctgggagttgctacagcaccgcagcaggtcttgtccaacggacggcccgtaagcaactttacctatagtcctgataccaaagttctggacatctgcgttgctctgctgatgggtgagcagttcctggtatcatggtgc

SEQ ID NO: 156 - protein, 944 aa, synthetic construct
  REGION 1..944: note = Variant of the Homo Sapiens Lysosomal alpha-glucosidase
MEWSWVFLFFLSVTTGVHSGHILWHDFQTVPRELSGSSQVLEETHPAHQVGASRPGPRDAQLHPGRPRAVPTQCDVPENSRFDCAPEKAITQEQCEARGCCYIPAKQGLQGAQMGQPWCFFPPSYPSYKLENLSQSEMGYTATLTRTTPSFFPKDILTLRLDVMMETENRLHFTIKDPANRRYEVPLETPHVHSRAPSPLYSVEFSEEPFGVIVRRQLDGRVLLNTTVAPLFFADQFLQLSTSLPSQYITGLAEHLSPLMLSTSWNKITLWNRDLAPTPGANLYGSHPFYLALEDGGSAHGVFLLNSNAMDVVLQPSPALSWRSTGGILDVYIFLGPEPKSVVQQYLDVVGYPFMPPYWGLGFHLCRWGYSSTAITRQVVENMTRAHFPLDVQWNDLDYMDSRRDFTFNKDGFRDFPAMVQELHQGGRRYMMIVDPGISSSGPAGSYRPYDEGLRRGVFITNETGQPLIGKVWPGSTAFPDFTNPEALAWWEDMVAEFHDQVPFDGMWIDMNEPSNFIRGSVDGCPNNELENPPYVPGVVGGTLQAATICASSHQFLSTHYNLHNLYGTTEAIASHRALVKARGTRPFVISRSTFAGHGRYAGHWTGDVWSSWEQLASSVPEILQFNLLGVPLVGADVCGFLGNTSEELCVRWTQLGAFYPFMRNHNSLTSLPQEPYSFSEPAQQAMRKALGLRYALLPHLYTLFHQAHVHGETVARPLFLEFPKDSSTWTVDHQMLWGEALLITPVLQPGKAEVTGYFPLGTWYDLQTVPVEALGSLPPPPAAPREPAIHSEGQWVTLPAPLDTINVHLREGYIIPLQGPGLTTTESRKQPMALAVALTKSGEARGELFWDDGESLEVLERGAYTQVIFEARNNTIVNELVHVTSEGAGLQLGKVTVLGVATAPQQVLSNGRPVSNFTYSPDTKVLDICVALLMGEQFLVSWC

SEQ ID NO: 157 - DNA, 2832 bp, synthetic construct
  misc_feature 1..2832: note = Variant of the Homo Sapiens Lysosomal alpha-glucosidase
  source 1..2832: mol_type = other DNA
atggaatggagctgggtctttctcttcttcctgtcagtaacgactggtgtccactccggacacattctgtggcatgatttttctaccgtgcctagagagctttccggttcaagtcaagtcctcgaagaaacacatccagcccatcaggttggcgcatctaggccgggccctcgggacgctcaactccacccagggagacctagggccgttcccactcagtgcgacgtgccagagaactcacgcttcgattgtgcacctgagaaggctatcacgcaagagcagtgcgaggcccgcggatgttgttacataccggctaaacaggggctgcagggtgcgcagatgggccaaccttggtgcttcttcccaccatcctatccgagttacaagctggagaatctctcccagtctgaaatgggatataccgcaacactgactcggaccaccccctccttctttcccaaagatatcttgactctgagacttgacgtaatgatggagacagaaaacaggctccactttaccattaaggaccctgccaatcgccgatacgaggtgcctctggaaacaccacacgtgcacagtagagctccatcacctctgtattctgtcgagttctccgaagagccgtttggcgttatcgtcaggaggcagctcgacgggcgagtgcttctgaacacgactgtggccccgttgttctttgcggatcagtttctgcaactgtcaacaagtctcccttctcagtacattaccgggcttgcagagcatctgtccccactcatgctgagtacttcatggaacaaaatcacactgtggaatagagaccttgctcctactccaggagccaacttgtatggttctcaccctttctacttggccctggaagatggcggatcagcgcatggcgtattcctcctgaattccaacgcaatggacgttgttcttcagccatctcctgctttgagttggagatctacaggcgggatactggacgtctacatctttctgggtccagagcctaaatccgtagtgcagcagtatcttgatgtcgtcggatacccgtttatgccaccatattggggcctggggttccacttgtgccgctggggatattcatccaccgccattacacgacaagttgttgagaatatgaccagggcacattttcctctggatgtacagtggaacgacctggactacatggatagtcgccgcgacttcaccttcaataaggatgggttcagagactttcctgctatggtccaagaacttcaccagggaggcaggaggtacatgatgatcgtagatccgggaatttcttcttctggcccagccggttcatacagaccgtatgacgaaggactgcgacgaggcgtctttatcacgaacgagactggtcagcctttgataggcaaggtttggccagggtccaccgctttcccggatttcacaaatcctgaggcactggcctggtgggaagatatggtcgccgagtttcacgaccaggtcccatttgacgggatgtggatcgacatgaacgagccatccaacttcattagaggaagtgtggatggctgtccgaataatgagctggaaaaccctccttacgtaccaggcgttgttggtgggactcttcaagctgcgacgatttgcgcatcctcccatcagttcctgtcaacccactataacttgcacaatctgtacgggacaacagaggctatcgccagtcatagggccctggtaaaagctagaggaacacgccctttcgttatctctcgctcaacttttgcaggccacggtaggtatgccggacattggaccggcgacgtctggagttcttgggaacagctggcttcctccgttccagagatattgcagtttaacctgttgggagtcccacttgtaggtgcagatgtttgtggcttcctggggaacacctcagaagaattgtgcgtaagatggactcaactgggcgccttctacccttttatgcgcaatcacaactcactgacatctttgcctcaagaaccgtactcatttagtgagccagcacagcaggccatgaggaaggctcttggcctgagatatgcacttctgccgcatctgtacacccttttccaccaggctcatgtcgcgggagagactgttgcacgacctctgttcttggagttcccaaaagactcttccacgtggacagtcgatcaccagatgctgtggggcgaggctctgctgattacacctgtattgcaacctggtaaggccgaagttaccgggtactttccattggggacctggtatgatctgcaaacagtcccggttgaagctcttggaagtcttccacctccacctgctgcaccaagggagcctgcgatccactctgaaggacagtgggtaactttgcctgcaccgctggacaccatcaatgtccatctgcgcgaaggctacatcataccacttcaaggtcctggactgaccactacagagtctagaaaacaaccaatggctcttgctgttgcactgactaaaagcggcgaagcaaggggtgagctgttctgggacgacggagagtcactggaggtactcgaacgaggcgcgtatacgcaggtcatttttgaggctcgcaataatacgatcgttaacgagctggtccacgtcacttcagaaggtgcaggccttcagttgggcaaggtaactgtcctgggagttgctacagcaccgcagcaggtcttgtccaacggacggcccgtaagcaactttacctatagtcctgataccaaagttctggacatctgcgttgctctgctgatgggtgagcagttcctggtatcatggtgc

SEQ ID NO: 158 - protein, 944 aa, synthetic construct
  REGION 1..944: note = Variant of the Homo Sapiens Lysosomal alpha-glucosidase
MEWSWVFLFFLSVTTGVHSGHILWHDFSTVPRELSGSSQVLEETHPAHQVGASRPGPRDAQLHPGRPRAVPTQCDVPENSRFDCAPEKAITQEQCEARGCCYIPAKQGLQGAQMGQPWCFFPPSYPSYKLENLSQSEMGYTATLTRTTPSFFPKDILTLRLDVMMETENRLHFTIKDPANRRYEVPLETPHVHSRAPSPLYSVEFSEEPFGVIVRRQLDGRVLLNTTVAPLFFADQFLQLSTSLPSQYITGLAEHLSPLMLSTSWNKITLWNRDLAPTPGANLYGSHPFYLALEDGGSAHGVFLLNSNAMDVVLQPSPALSWRSTGGILDVYIFLGPEPKSVVQQYLDVVGYPFMPPYWGLGFHLCRWGYSSTAITRQVVENMTRAHFPLDVQWNDLDYMDSRRDFTFNKDGFRDFPAMVQELHQGGRRYMMIVDPGISSSGPAGSYRPYDEGLRRGVFITNETGQPLIGKVWPGSTAFPDFTNPEALAWWEDMVAEFHDQVPFDGMWIDMNEPSNFIRGSVDGCPNNELENPPYVPGVVGGTLQAATICASSHQFLSTHYNLHNLYGTTEAIASHRALVKARGTRPFVISRSTFAGHGRYAGHWTGDVWSSWEQLASSVPEILQFNLLGVPLVGADVCGFLGNTSEELCVRWTQLGAFYPFMRNHNSLTSLPQEPYSFSEPAQQAMRKALGLRYALLPHLYTLFHQAHVAGETVARPLFLEFPKDSSTWTVDHQMLWGEALLITPVLQPGKAEVTGYFPLGTWYDLQTVPVEALGSLPPPPAAPREPAIHSEGQWVTLPAPLDTINVHLREGYIIPLQGPGLTTTESRKQPMALAVALTKSGEARGELFWDDGESLEVLERGAYTQVIFEARNNTIVNELVHVTSEGAGLQLGKVTVLGVATAPQQVLSNGRPVSNFTYSPDTKVLDICVALLMGEQFLVSWC

SEQ ID NO: 159 - DNA, 2832 bp, synthetic construct
  misc_feature 1..2832: note = Variant of the Homo Sapiens Lysosomal alpha-glucosidase
  source 1..2832: mol_type = other DNA
atggaatggagctgggtctttctcttcttcctgtcagtaacgactggtgtccactccggacacattctgtggcatgatttttctaccgtgcctagagagctttccggttcaagtcaagtcctcgaagaaacacatccagcccatcaggttggcgcatctaggccgggccctcgggacgctcaactccacccagggagacctagggccgttcccactcagtgcgacgtgccagagaactcacgcttcgattgtgcacctgagaaggctatcacgcaagagcagtgcgaggcccgcggatgttgttacataccggctaaacaggggctgcagggtgcgcagatgggccaaccttggtgcttcttcccaccatcctatccgagttacaagctggagaatctctcccagtctgaaatgggatataccgcaacactgactcggaccaccccctccttctttcccaaagatatcttgactctgagacttgacgtaatgatggagacagaaaacaggctccactttaccattaaggaccctgccaatcgccgatacgaggtgcctctggaaacaccacacgtgcacagtagagctccatcacctctgtattctgtcgagttctccgaagagccgtttggcgttatcgtcaggaggcagctcgacgggcgagtgcttctgaacacgactgtggccccgttgttctttgcggatcagtttctgcaactgtcaacaagtctcccttctcagtacattaccgggcttgcagagcatctgtccccactcatgctgagtacttcatggcataaaatcacactgtggaatagagaccttgctcctactccaggagccaacttgtatggttctcaccctttctacttggccctggaagatggcggatcagcgcatggcgtattcctcctgaattccaacgcaatggacgttgttcttcagccatctcctgctttgagttggagatctacaggcgggatactggacgtctacatctttctgggtccagagcctaaatccgtagtgcagcagtatcttgatgtcgtcggatacccgtttatgccaccatattggggcctggggttccacttgtgccgctggggatattcatccaccgccattacacgacaagttgttgagaatatgaccagggcacattttcctctggatgtacagtggaacgacctggactacatggatagtcgccgcgacttcaccttcaataaggatgggttcagagactttcctgctatggtccaagaacttcaccagggaggcaggaggtacatgatgatcgtagatccgggaatttcttcttctggcccagccggttcatacagaccgtatgacgaaggactgcgacgaggcgtctttatcacgaacgagactggtcagcctttgataggcaaggtttggccagggtccaccgctttcccggatttcacaaatcctgaggcactggcctggtgggaagatatggtcgccgagtttcacgaccaggtcccatttgacgggatgtggatcgacatgaacgagccatccaacttcattagaggaagtgtggatggctgtccgaataatgagctggaaaaccctccttacgtaccaggcgttgttggtgggactcttcaagctgcgacgatttgcgcatcctcccatcagttcctgtcaacccactataacttgcacaatctgtacgggacaacagaggctatcgccagtcatagggccctggtaaaagctagaggaacacgccctttcgttatctctcgctcaacttttgcaggccacggtaggtatgccggacattggaccggcgacgtctggagttcttgggaacagctggcttcctccgttccagagatattgcagtttaacctgttgggagtcccacttgtaggtgcagatgtttgtggcttcctggggaacacctcagaagaattgtgcgtaagatggactcaactgggcgccttctacccttttatgcgcaatcacaactcactgacatctttgcctcaagaaccgtactcatttagtgagccagcacagcaggccatgaggaaggctcttggcctgagatatgcacttctgccgcatctgtacacccttttccaccaggctcatgtccatggagagactgttgcacgacctctgttcttggagttcccaaaagactcttccacgtggacagtcgatcaccagatgctgtggggcgaggctctgctgattacacctgtattgcaacctggtaaggccgaagttaccgggtactttccattggggacctggtatgatctgcaaacagtcccggttgaagctcttggaagtcttccacctccacctgctgcaccaagggagcctgcgatccactctgaaggacagtgggtaactttgcctgcaccgctggacaccatcaatgtccatctgcgcgaaggctacatcataccacttcaaggtcctggactgaccactacagagtctagaaaacaaccaatggctcttgctgttgcactgactaaaagcggcgaagcaaggggtgagctgttctgggacgacggagagtcactggaggtactcgaacgaggcgcgtatacgcaggtcatttttgaggctcgcaataatacgatcgttaacgagctggtccacgtcacttcagaaggtgcaggccttcagttgggcaaggtaactgtcctgggagttgctacagcaccgcagcaggtcttgtccaacggacggcccgtaagcaactttacctatagtcctgataccaaagttctggacatctgcgttgctctgctgatgggtgagcagttcctggtatcatggtgc

SEQ ID NO: 160 - protein, 944 aa, synthetic construct
  REGION 1..944: note = Variant of the Homo Sapiens Lysosomal alpha-glucosidase
MEWSWVFLFFLSVTTGVHSGHILWHDFSTVPRELSGSSQVLEETHPAHQVGASRPGPRDAQLHPGRPRAVPTQCDVPENSRFDCAPEKAITQEQCEARGCCYIPAKQGLQGAQMGQPWCFFPPSYPSYKLENLSQSEMGYTATLTRTTPSFFPKDILTLRLDVMMETENRLHFTIKDPANRRYEVPLETPHVHSRAPSPLYSVEFSEEPFGVIVRRQLDGRVLLNTTVAPLFFADQFLQLSTSLPSQYITGLAEHLSPLMLSTSWHKITLWNRDLAPTPGANLYGSHPFYLALEDGGSAHGVFLLNSNAMDVVLQPSPALSWRSTGGILDVYIFLGPEPKSVVQQYLDVVGYPFMPPYWGLGFHLCRWGYSSTAITRQVVENMTRAHFPLDVQWNDLDYMDSRRDFTFNKDGFRDFPAMVQELHQGGRRYMMIVDPGISSSGPAGSYRPYDEGLRRGVFITNETGQPLIGKVWPGSTAFPDFTNPEALAWWEDMVAEFHDQVPFDGMWIDMNEPSNFIRGSVDGCPNNELENPPYVPGVVGGTLQAATICASSHQFLSTHYNLHNLYGTTEAIASHRALVKARGTRPFVISRSTFAGHGRYAGHWTGDVWSSWEQLASSVPEILQFNLLGVPLVGADVCGFLGNTSEELCVRWTQLGAFYPFMRNHNSLTSLPQEPYSFSEPAQQAMRKALGLRYALLPHLYTLFHQAHVHGETVARPLFLEFPKDSSTWTVDHQMLWGEALLITPVLQPGKAEVTGYFPLGTWYDLQTVPVEALGSLPPPPAAPREPAIHSEGQWVTLPAPLDTINVHLREGYIIPLQGPGLTTTESRKQPMALAVALTKSGEARGELFWDDGESLEVLERGAYTQVIFEARNNTIVNELVHVTSEGAGLQLGKVTVLGVATAPQQVLSNGRPVSNFTYSPDTKVLDICVALLMGEQFLVSWC

SEQ ID NO: 161 - DNA, 2832 bp, synthetic construct
  misc_feature 1..2832: note = Variant of the Homo Sapiens Lysosomal alpha-glucosidase
  source 1..2832: mol_type = other DNA
atggaatggagctgggtctttctcttcttcctgtcagtaacgactggtgtccactccggacacattctgtggcatgatttttctaccgtgcctagagagctttccggttcaagtcaagtcctcgaagaaacacatccagcccatcaggttggcgcatctaggccgggccctcgggacgctcaaccgcacccagggagacctagggccgttcccactcagtgcgacgtgccagagaactcacgcttcgattgtgcacctgagaaggctatcacgcaagagcagtgcgaggcccgcggatgttgttacataccggctaaacaggggctgcagggtgcgcagatgggccaaccttggtgcttcttcccaccatcctatccgagttacaagctggagaatctctcccagtctgaaatgggatataccgcaacactgactcggaccaccccctccttctttcccaaagatatcttgactctgagacttgacgtaatgatggagacagaaaacaggctccactttaccattaaggaccctgccaatcgccgatacgaggtgcctctggaaacaccacacgtgcacagtagagctccatcacctctgtattctgtcgagttctccgaagagccgtttggcgttatcgtcaggaggcagctcgacgggcgagtgcttctgaacacgactgtggccccgttgttctttgcggatcagtttctgcaactgtcaacaagtctcccttctcagtacattaccgggcttgcagagcatctgtccccactcatgctgagtacttcatggaacaaaatcacactgtggaatagagaccttgctcctactccaggagccaacttgtatggttctcaccctttctacttggccctggaagatggcggatcagcgcatggcgtattcctcctgaattccaacgcaatggacgttgttcttcagccatctcctgctttgagttggagatctacaggcgggatactggacgtctacatctttctgggtccagagcctaaatccgtagtgcagcagtatcttgatgtcgtcggatacccgtttatgccaccatattggggcctggggttccacttgtgccgctggggatattcatccaccgccattacacgacaagttgttgagaatatgaccagggcacattttcctctggatgtacagtggaacgacctggactacatggatagtcgccgcgacttcaccttcaataaggatgggttcagagactttcctgctatggtccaagaacttcaccagggaggcaggaggtacatgatgatcgtagatccgggaatttcttcttctggcccagccggttcatacagaccgtatgacgaaggactgcgacgaggcgtctttatcacgaacgagactggtcagcctttgataggcaaggtttggccagggtccaccgctttcccggatttcacaaatcctgaggcactggcctggtgggaagatatggtcgccgagtttcacgaccaggtcccatttgacgggatgtggatcgacatgaacgagccatccaacttcattagaggaagtgtggatggctgtccgaataatgagctggaaaaccctccttacgtaccaggcgttgttggtgggactcttcaagctgcgacgatttgcgcatcctcccatcagttcctgtcaacccactataacttgcacaatctgtacgggacaacagaggctatcgccagtcatagggccctggtaaaagctagaggaacacgccctttcgttatctctcgctcaacttttgcaggccacggtaggtatgccggacattggaccggcgacgtctggagttcttgggaacagctggcttcctccgttccagagatattgcagtttaacctgttgggagtcccacttgtaggtgcagatgtttgtggcttcctggggaacacctcagaagaattgtgcgtaagatggactcaactgggcgccttctacccttttatgcgcaatcacaactcactgacatctttgcctcaagaaccgtactcatttagtgagccagcacagcaggccatgaggaaggctcttggcctgagatatgcacttctgccgcatctgtacacccttttccaccaggctcatgtccatggagagactgttgcacgacctctgttcttggagttcccaaaagactcttccacgtggacagtcgatcaccagatgctgtggggcgaggctctgctgattacacctgtattgcaacctggtaaggccgaagttaccgggtactttccattggggacctggtatgatctgcaaacagtcccggttgaagctcttggaagtcttccacctccacctgctgcaccaagggagcctgcgatccactctgaaggacagtgggtaactttgcctgcaccgctggacaccatcaatgtccatctgcgcgaaggctacatcataccacttcaaggtcctggactgaccactacagagtctagaaaacaaccaatggctcttgctgttgcactgactaaaagcggcgaagcaaggggtgagctgttctgggacgacggagagtcactggaggtactcgaacgaggcgcgtatacgcaggtcatttttgaggctcgcaataatacgatcgttaacgagctggtccacgtcacttcagaaggtgcaggccttcagttgggcaaggtaactgtcctgggagttgctacagcaccgcagcaggtcttgtccaacggacggcccgtaagcaactttacctatagtcctgataccaaagttctggacatctgcgttgctctgctgatgggtgagcagttcctggtatcatggtgc

SEQ ID NO: 162 - protein, 944 aa, synthetic construct
  REGION 1..944: note = Variant of the Homo Sapiens Lysosomal alpha-glucosidase
MEWSWVFLFFLSVTTGVHSGHILWHDFSTVPRELSGSSQVLEETHPAHQVGASRPGPRDAQPHPGRPRAVPTQCDVPENSRFDCAPEKAITQEQCEARGCCYIPAKQGLQGAQMGQPWCFFPPSYPSYKLENLSQSEMGYTATLTRTTPSFFPKDILTLRLDVMMETENRLHFTIKDPANRRYEVPLETPHVHSRAPSPLYSVEFSEEPFGVIVRRQLDGRVLLNTTVAPLFFADQFLQLSTSLPSQYITGLAEHLSPLMLSTSWNKITLWNRDLAPTPGANLYGSHPFYLALEDGGSAHGVFLLNSNAMDVVLQPSPALSWRSTGGILDVYIFLGPEPKSVVQQYLDVVGYPFMPPYWGLGFHLCRWGYSSTAITRQVVENMTRAHFPLDVQWNDLDYMDSRRDFTFNKDGFRDFPAMVQELHQGGRRYMMIVDPGISSSGPAGSYRPYDEGLRRGVFITNETGQPLIGKVWPGSTAFPDFTNPEALAWWEDMVAEFHDQVPFDGMWIDMNEPSNFIRGSVDGCPNNELENPPYVPGVVGGTLQAATICASSHQFLSTHYNLHNLYGTTEAIASHRALVKARGTRPFVISRSTFAGHGRYAGHWTGDVWSSWEQLASSVPEILQFNLLGVPLVGADVCGFLGNTSEELCVRWTQLGAFYPFMRNHNSLTSLPQEPYSFSEPAQQAMRKALGLRYALLPHLYTLFHQAHVHGETVARPLFLEFPKDSSTWTVDHQMLWGEALLITPVLQPGKAEVTGYFPLGTWYDLQTVPVEALGSLPPPPAAPREPAIHSEGQWVTLPAPLDTINVHLREGYIIPLQGPGLTTTESRKQPMALAVALTKSGEARGELFWDDGESLEVLERGAYTQVIFEARNNTIVNELVHVTSEGAGLQLGKVTVLGVATAPQQVLSNGRPVSNFTYSPDTKVLDICVALLMGEQFLVSWC

SEQ ID NO: 163 - DNA, 2832 bp, synthetic construct
  misc_feature 1..2832: note = Variant of the Homo Sapiens Lysosomal alpha-glucosidase
  source 1..2832: mol_type = other DNA
atggaatggagctgggtctttctcttcttcctgtcagtaacgactggtgtccactccggacacattctgtggcatgatttttctaccgtgcctagagagctttccggttcaagtctggtcctcgaagaaacacatccagcccatcaggttggcgcatctaggccgggccctcgggacgctcaactccacccagggagacctagggccgttcccactcagtgcgacgtgccagagaactcacgcttcgattgtgcacctgagaaggctatcacgcaagagcagtgcgaggcccgcggatgttgttacataccggctaaacaggggctgcagggtgcgcagatgggccaaccttggtgcttcttcccaccatcctatccgagttacaagctggagaatctctcccagtctgaaatgggatataccgcaacactgactcggaccaccccctccttctttcccaaagatatcttgactctgagacttgacgtaatgatggagacagaaaacaggctccactttaccattaaggaccctgccaatcgccgatacgaggtgcctctggaaacaccacacgtgcacagtagagctccatcacctctgtattctgtcgagttctccgaagagccgtttggcgttatcgtcaggaggcagctcgacgggcgagtgcttctgaacacgactgtggccccgttgttctttgcggatcagtttctgcaactgtcaacaagtctcccttctcagtacattaccgggcttgcagagcatctgtccccactcatgctgagtacttcatggaacaaaatcacactgtggaatagagaccttgctcctactccaggagccaacttgtatggttctcaccctttctacttggccctggaagatggcggatcagcgcatggcgtattcctcctgaattccaacgcaatggacgttgttcttcagccatctcctgctttgagttggagatctacaggcgggatactggacgtctacatctttctgggtccagagcctaaatccgtagtgcagcagtatcttgatgtcgtcggatacccgtttatgccaccatattggggcctggggttccacttgtgccgctggggatattcatccaccgccattacacgacaagttgttgagaatatgaccagggcacattttcctctggatgtacagtggaacgacctggactacatggatagtcgccgcgacttcaccttcaataaggatgggttcagagactttcctgctatggtccaagaacttcaccagggaggcaggaggtacatgatgatcgtagatccgggaatttcttcttctggcccagccggttcatacagaccgtatgacgaaggactgcgacgaggcgtctttatcacgaacgagactggtcagcctttgataggcaaggtttggccagggtccaccgctttcccggatttcacaaatcctgaggcactggcctggtgggaagatatggtcgccgagtttcacgaccaggtcccatttgacgggatgtggatcgacatgaacgagccatccaacttcattagaggaagtgtggatggctgtccgaataatgagctggaaaaccctccttacgtaccaggcgttgttggtgggactcttcaagctgcgacgatttgcgcatcctcccatcagttcctgtcaacccactataacttgcacaatctgtacgggacaacagaggctatcgccagtcatagggccctggtaaaagctagaggaacacgccctttcgttatctctcgctcaacttttgcaggccacggtaggtatgccggacattggaccggcgacgtctggagttcttgggaacagctggcttcctccgttccagagatattgcagtttaacctgttgggagtcccacttgtaggtgcagatgtttgtggcttcctggggaacacctcagaagaattgtgcgtaagatggactcaactgggcgccttctacccttttatgcgcaatcacaactcactgacatctttgcctcaagaaccgtactcatttagtgagccagcacagcaggccatgaggaaggctcttggcctgagatatgcacttctgccgcatctgtacacccttttccaccaggctcatgtccatggagagactgttgcacgacctctgttcttggagttcccaaaagactcttccacgtggacagtcgatcaccagatgctgtggggcgaggctctgctgattacacctgtattgcaacctggtaaggccgaagttaccgggtactttccattggggacctggtatgatctgcaaacagtcccggttgaagctcttggaagtcttccacctccacctgctgcaccaagggagcctgcgatccactctgaaggacagtgggtaactttgcctgcaccgctggacaccatcaatgtccatctgcgcgaaggctacatcataccacttcaaggtcctggactgaccactacagagtctagaaaacaaccaatggctcttgctgttgcactgactaaaagcggcgaagcaaggggtgagctgttctgggacgacggagagtcactggaggtactcgaacgaggcgcgtatacgcaggtcatttttgaggctcgcaataatacgatcgttaacgagctggtccacgtcacttcagaaggtgcaggccttcagttgggcaaggtaactgtcctgggagttgctacagcaccgcagcaggtcttgtccaacggacggcccgtaagcaactttacctatagtcctgataccaaagttctggacatctgcgttgctctgctgatgggtgagcagttcctggtatcatggtgc

SEQ ID NO: 164 - protein, 944 aa, synthetic construct
  REGION 1..944: note = Variant of the Homo Sapiens Lysosomal alpha-glucosidase
MEWSWVFLFFLSVTTGVHSGHILWHDFSTVPRELSGSSLVLEETHPAHQVGASRPGPRDAQLHPGRPRAVPTQCDVPENSRFDCAPEKAITQEQCEARGCCYIPAKQGLQGAQMGQPWCFFPPSYPSYKLENLSQSEMGYTATLTRTTPSFFPKDILTLRLDVMMETENRLHFTIKDPANRRYEVPLETPHVHSRAPSPLYSVEFSEEPFGVIVRRQLDGRVLLNTTVAPLFFADQFLQLSTSLPSQYITGLAEHLSPLMLSTSWNKITLWNRDLAPTPGANLYGSHPFYLALEDGGSAHGVFLLNSNAMDVVLQPSPALSWRSTGGILDVYIFLGPEPKSVVQQYLDVVGYPFMPPYWGLGFHLCRWGYSSTAITRQVVENMTRAHFPLDVQWNDLDYMDSRRDFTFNKDGFRDFPAMVQELHQGGRRYMMIVDPGISSSGPAGSYRPYDEGLRRGVFITNETGQPLIGKVWPGSTAFPDFTNPEALAWWEDMVAEFHDQVPFDGMWIDMNEPSNFIRGSVDGCPNNELENPPYVPGVVGGTLQAATICASSHQFLSTHYNLHNLYGTTEAIASHRALVKARGTRPFVISRSTFAGHGRYAGHWTGDVWSSWEQLASSVPEILQFNLLGVPLVGADVCGFLGNTSEELCVRWTQLGAFYPFMRNHNSLTSLPQEPYSFSEPAQQAMRKALGLRYALLPHLYTLFHQAHVHGETVARPLFLEFPKDSSTWTVDHQMLWGEALLITPVLQPGKAEVTGYFPLGTWYDLQTVPVEALGSLPPPPAAPREPAIHSEGQWVTLPAPLDTINVHLREGYIIPLQGPGLTTTESRKQPMALAVALTKSGEARGELFWDDGESLEVLERGAYTQVIFEARNNTIVNELVHVTSEGAGLQLGKVTVLGVATAPQQVLSNGRPVSNFTYSPDTKVLDICVALLMGEQFLVSWC

SEQ ID NO: 165 - DNA, 2832 bp, synthetic construct
  misc_feature 1..2832: note = Variant of the Homo Sapiens Lysosomal alpha-glucosidase
  source 1..2832: mol_type = other DNA
atggaatggagctgggtctttctcttcttcctgtcagtaacgactggtgtccactccggacacattctgtggcatgatttttctaccgtgcctagagagctttccggttcaagtcaagtcctcgaagaaacacatccagcccatcaggttggcgcatctaggccgggccctcgggacgctcaactccacccagggagacctagggccgttcccactcagtgcgacgtgccagagaactcacgcttcgattgtgcacctgagaaggctatcacgcaagagcagtgcgaggcccgcggatgttgttacataccggctaaacaggggctgcagggtgcgcagatgggccaaccttggtgcttcttcccaccatcctatccgagttacaagctggagaatctctcccagtctgaaatgggatataccgcaacactgactcggaccaccccctccttctttcccaaagatatcttgactctgagacttgacgtaatgatggagacagaaaacaggctccactttaccattaaggaccctgccaatcgccgatacgaggtgcctctggaaacaccacacgtgcacagtagagctccatcacctctgtattctgtcgagttctccgaagagccgtttggcgttatcgtcaggaggcagctcgacgggcgagtgcttctgaacacgactgtggccccgttgttctttgcggatcagtttctgcaactgtcaacaagtctcccttctcagtacattaccgggcttgcagagcatctgtccccactcatgctgagtacttcatggaacaaaatcacactgtggaatagagaccttgctcctactccaggagccaacttgtatggttctcaccctttctacttggccctggaagatggcggatcagcgcatggcgtattcctcctgaattccaacgcaatggacgttgttcttcagccatctcctgctttgagttggagatctacaggcgggatactggacgtctacatctttctgggtccagagcctaaatccgtagtgcagcagtatcttgatgtcgtcggatacccgtttatgccaccatattggggcctggggttccacttgtgccgctggggatattcatccaccgccattacacgacaagttgttgagaatatgaccagggcacattttcctctggatgtacagtggaacgacctggactacatggatagtcgccgcgacttcaccttcaataaggatgggttcagagactttcctgctatggtccaagaacttcaccagggaggcaggaggtacatgatgatcgtagatccgggaatttcttcttctggcccagccggttcatacagaccgtatgacgaaggactgcgacgaggcgtctttatcacgaacgagactggtcagcctttgataggcaaggtttggccagggtccaccgctttcccggatttcacaaatcctgatgcactggcctggtgggaagatatggtcgccgagtttcacgaccaggtcccatttgacgggatgtggatcgacatgaacgagccatccaacttcattagaggaagtgtggatggctgtccgaataatgagctggaaaaccctccttacgtaccaggcgttgttggtgggactcttcaagctgcgacgatttgcgcatcctcccatcagttcctgtcaacccactataacttgcacaatctgtacgggacaacagaggctatcgccagtcatagggccctggtaaaagctagaggaacacgccctttcgttatctctcgctcaacttttgcaggccacggtaggtatgccggacattggaccggcgacgtctggagttcttgggaacagctggcttcctccgttccagagatattgcagtttaacctgttgggagtcccacttgtaggtgcagatgtttgtggcttcctggggaacacctcagaagaattgtgcgtaagatggactcaactgggcgccttctacccttttatgcgcaatcacaactcactgacatctttgcctcaagaaccgtactcatttagtgagccagcacagcaggccatgaggaaggctcttggcctgagatatgcacttctgccgcatctgtacacccttttccaccaggctcatgtccatggagagactgttgcacgacctctgttcttggagttcccaaaagactcttccacgtggacagtcgatcaccagatgctgtggggcgaggctctgctgattacacctgtattgcaacctggtaaggccgaagttaccgggtactttccattggggacctggtatgatctgcaaacagtcccggttgaagctcttggaagtcttccacctccacctgctgcaccaagggagcctgcgatccactctgaaggacagtgggtaactttgcctgcaccgctggacaccatcaatgtccatctgcgcgaaggctacatcataccacttcaaggtcctggactgaccactacagagtctagaaaacaaccaatggctcttgctgttgcactgactaaaagcggcgaagcaaggggtgagctgttctgggacgacggagagtcactggaggtactcgaacgaggcgcgtatacgcaggtcatttttgaggctcgcaataatacgatcgttaacgagctggtccacgtcacttcagaaggtgcaggccttcagttgggcaaggtaactgtcctgggagttgctacagcaccgcagcaggtcttgtccaacggacggcccgtaagcaactttacctatagtcctgataccaaagttctggacatctgcgttgctctgctgatgggtgagcagttcctggtatcatggtgc

SEQ ID NO: 166 - protein, 944 aa, synthetic construct
  REGION 1..944: note = Variant of the Homo Sapiens Lysosomal alpha-glucosidase
MEWSWVFLFFLSVTTGVHSGHILWHDFSTVPRELSGSSQVLEETHPAHQVGASRPGPRDAQLHPGRPRAVPTQCDVPENSRFDCAPEKAITQEQCEARGCCYIPAKQGLQGAQMGQPWCFFPPSYPSYKLENLSQSEMGYTATLTRTTPSFFPKDILTLRLDVMMETENRLHFTIKDPANRRYEVPLETPHVHSRAPSPLYSVEFSEEPFGVIVRRQLDGRVLLNTTVAPLFFADQFLQLSTSLPSQYITGLAEHLSPLMLSTSWNKITLWNRDLAPTPGANLYGSHPFYLALEDGGSAHGVFLLNSNAMDVVLQPSPALSWRSTGGILDVYIFLGPEPKSVVQQYLDVVGYPFMPPYWGLGFHLCRWGYSSTAITRQVVENMTRAHFPLDVQWNDLDYMDSRRDFTFNKDGFRDFPAMVQELHQGGRRYMMIVDPGISSSGPAGSYRPYDEGLRRGVFITNETGQPLIGKVWPGSTAFPDFTNPDALAWWEDMVAEFHDQVPFDGMWIDMNEPSNFIRGSVDGCPNNELENPPYVPGVVGGTLQAATICASSHQFLSTHYNLHNLYGTTEAIASHRALVKARGTRPFVISRSTFAGHGRYAGHWTGDVWSSWEQLASSVPEILQFNLLGVPLVGADVCGFLGNTSEELCVRWTQLGAFYPFMRNHNSLTSLPQEPYSFSEPAQQAMRKALGLRYALLPHLYTLFHQAHVHGETVARPLFLEFPKDSSTWTVDHQMLWGEALLITPVLQPGKAEVTGYFPLGTWYDLQTVPVEALGSLPPPPAAPREPAIHSEGQWVTLPAPLDTINVHLREGYIIPLQGPGLTTTESRKQPMALAVALTKSGEARGELFWDDGESLEVLERGAYTQVIFEARNNTIVNELVHVTSEGAGLQLGKVTVLGVATAPQQVLSNGRPVSNFTYSPDTKVLDICVALLMGEQFLVSWC

SEQ ID NO: 167 - DNA, 2832 bp, synthetic construct
  misc_feature 1..2832: note = Variant of the Homo Sapiens Lysosomal alpha-glucosidase
  source 1..2832: mol_type = other DNA
atggaatggagctgggtctttctcttcttcctgtcagtaacgactggtgtccactccggacacattctgtggcatgatttttctaccgtgcctagagagctttccggttcaagtcaagtcctcgaagaaacacatccagcccatcaggttggcgcatctaggccgggccctcgggacgctcaactccacccagggagacctagggccgttcccactcagtgcgacgtgccagagaactcacgcttcgattgtgcacctgagaaggctatcacgcaagagcagtgcgaggcccgcggatgttgttacataccggctaaacaggggctgcagggtgcgcagatgggccaaccttggtgcttcttcccaccatcctatccgagttacaagctggagaatctctcccagtctgaaatgggatataccgcaacactgactcggaccaccccctccttctttcccaaagatatcttgactctgagacttgacgtaatgatggagacagaaaacaggctccactttaccattaaggaccctgccaatcgccgatacgaggtgcctctggaaacaccacacgtgcacagtagagctccatcacctctgtattctgtcgagttctccgaagagccgtttggcgttatcgtcaggaggcagctcgacgggcgagtgcttctgaacacgactgtggccccgttgttctttgcggatcagtttctgcaactgtcaacaagtctcccttctcagtacattaccgggcttgcagagcatctgtccccactcatgctgagtacttcatggaacaaaatcacactgtggaatagagaccttgctcctactccaggagccaacttgtatggttctcaccctttctacttggccctggaagatggcggatcagcgcatggcgtattcctcctgaattccaacgcaatggacgttgttcttcagccatctcctgctttgagttggagatctacaggcgggatactggacgtctacatctttctgggtccagagcctaaatccgtagtgcagcagtatcttgatgtcgtcggatacccgtttatgccaccatattggggcctggggttccacttgtgccgctggggatattcatccaccgccattacacgacaagttgttgagaatatgaccagggcacattttcctctggatgtacagtggaacgacctggactacatggatagtcgccgcgacttcaccttcaataaggatgggttcagagactttcctgctatggtccaagaacttcaccagggaggcaggaggtacatgatgatcgtagatccgggaatttcttcttctggcccagccggttcatacagaccgtatgacgaaggactgcgacgaggcgtctttatcacgaacgagactggtcagcctttgataggcaaggtttggccagggtccaccgctttcccggatttcacaaatcctgaggcactggcctggtgggaagatatggtcgccgagtttcacgaccaggtcccatttgacgggatgtggatcgacatgaacgagccatccaacttcattagaggaagtgtggatggctgtccgaataatgagctggaaaaccctccttacgtaccaggcgttgttggtgggactcttcaagctgcgacgatttgcgcatcctcccatcagttcctgtcaacccactataacttgcacaatctgtacgggacaacagaggctatcgccagtcatagggccctggtaaaagctagaggaacacgccctttcgttatctctcgctcaacttttgcaggccacggtaggtatgccggacattggaccggcgacgtctggagttcttgggaacagctggcttcctccgttccagagatattgcagtttaacctgttgggagtcccacttgtaggtgcagatgtttgtggcttcctggggaacacctcagaagaattgtgcgtaagatggactcaactgggcgccttctacccttttatgcgcaatcacaactcactgacatctttgcctcaagaaccgtactcatttagtgagccagcacagcaggccatgaggaaggctcttggcctgagatatgcacttctgccgcatctgtacacccttttccaccaggctcatgtcgggggagagactgttgcacgacctctgttcttggagttcccaaaagactcttccacgtggacagtcgatcaccagatgctgtggggcgaggctctgctgattacacctgtattgcaacctggtaaggccgaagttaccgggtactttccattggggacctggtatgatctgcaaacagtcccggttgaagctcttggaagtcttccacctccacctgctgcaccaagggagcctgcgatccactctgaaggacagtgggtaactttgcctgcaccgctggacaccatcaatgtccatctgcgcgaaggctacatcataccacttcaaggtcctggactgaccactacagagtctagaaaacaaccaatggctcttgctgttgcactgactaaaagcggcgaagcaaggggtgagctgttctgggacgacggagagtcactggaggtactcgaacgaggcgcgtatacgcaggtcatttttgaggctcgcaataatacgatcgttaacgagctggtccacgtcacttcagaaggtgcaggccttcagttgggcaaggtaactgtcctgggagttgctacagcaccgcagcaggtcttgtccaacggacggcccgtaagcaactttacctatagtcctgataccaaagttctggacatctgcgttgctctgctgatgggtgagcagttcctggtatcatggtgc

SEQ ID NO: 168 - protein, 944 aa, synthetic construct
  REGION 1..944: note = Variant of the Homo Sapiens Lysosomal alpha-glucosidase
MEWSWVFLFFLSVTTGVHSGHILWHDFSTVPRELSGSSQVLEETHPAHQVGASRPGPRDAQLHPGRPRAVPTQCDVPENSRFDCAPEKAITQEQCEARGCCYIPAKQGLQGAQMGQPWCFFPPSYPSYKLENLSQSEMGYTATLTRTTPSFFPKDILTLRLDVMMETENRLHFTIKDPANRRYEVPLETPHVHSRAPSPLYSVEFSEEPFGVIVRRQLDGRVLLNTTVAPLFFADQFLQLSTSLPSQYITGLAEHLSPLMLSTSWNKITLWNRDLAPTPGANLYGSHPFYLALEDGGSAHGVFLLNSNAMDVVLQPSPALSWRSTGGILDVYIFLGPEPKSVVQQYLDVVGYPFMPPYWGLGFHLCRWGYSSTAITRQVVENMTRAHFPLDVQWNDLDYMDSRRDFTFNKDGFRDFPAMVQELHQGGRRYMMIVDPGISSSGPAGSYRPYDEGLRRGVFITNETGQPLIGKVWPGSTAFPDFTNPEALAWWEDMVAEFHDQVPFDGMWIDMNEPSNFIRGSVDGCPNNELENPPYVPGVVGGTLQAATICASSHQFLSTHYNLHNLYGTTEAIASHRALVKARGTRPFVISRSTFAGHGRYAGHWTGDVWSSWEQLASSVPEILQFNLLGVPLVGADVCGFLGNTSEELCVRWTQLGAFYPFMRNHNSLTSLPQEPYSFSEPAQQAMRKALGLRYALLPHLYTLFHQAHVGGETVARPLFLEFPKDSSTWTVDHQMLWGEALLITPVLQPGKAEVTGYFPLGTWYDLQTVPVEALGSLPPPPAAPREPAIHSEGQWVTLPAPLDTINVHLREGYIIPLQGPGLTTTESRKQPMALAVALTKSGEARGELFWDDGESLEVLERGAYTQVIFEARNNTIVNELVHVTSEGAGLQLGKVTVLGVATAPQQVLSNGRPVSNFTYSPDTKVLDICVALLMGEQFLVSWC

SEQ ID NO: 169 - DNA, 2832 bp, synthetic construct
  misc_feature 1..2832: note = Variant of the Homo Sapiens Lysosomal alpha-glucosidase
  source 1..2832: mol_type = other DNA
atggaatggagctgggtctttctcttcttcctgtcagtaacgactggtgtccactccggacacattctgaatcatgatttttctaccgtgcctagagagctttccggttcaagtcaagtcctcgaagaaacacatccagcccatcaggttggcgcatctaggccgggccctcgggacgctcaactccacccagggagacctagggccgttcccactcagtgcgacgtgccagagaactcacgcttcgattgtgcacctgagaaggctatcacgcaagagcagtgcgaggcccgcggatgttgttacataccggctaaacaggggctgcagggtgcgcagatgggccaaccttggtgcttcttcccaccatcctatccgagttacaagctggagaatctctcccagtctgaaatgggatataccgcaacactgactcggaccaccccctccttctttcccaaagatatcttgactctgagacttgacgtaatgatggagacagaaaacaggctccactttaccattaaggaccctgccaatcgccgatacgaggtgcctctggaaacaccacacgtgcacagtagagctccatcacctctgtattctgtcgagttctccgaagagccgtttggcgttatcgtcaggaggcagctcgacgggcgagtgcttctgaacacgactgtggccccgttgttctttgcggatcagtttctgcaactgtcaacaagtctcccttctcagtacattaccgggcttgcagagcatctgtccccactcatgctgagtacttcatggaacaaaatcacactgtggaatagagaccttgctcctactccaggagccaacttgtatggttctcaccctttctacttggccctggaagatggcggatcagcgcatggcgtattcctcctgaattccaacgcaatggacgttgttcttcagccatctcctgctttgagttggagatctacaggcgggatactggacgtctacatctttctgggtccagagcctaaatccgtagtgcagcagtatcttgatgtcgtcggatacccgtttatgccaccatattggggcctggggttccacttgtgccgctggggatattcatccaccgccattacacgacaagttgttgagaatatgaccagggcacattttcctctggatgtacagtggaacgacctggactacatggatagtcgccgcgacttcaccttcaataaggatgggttcagagactttcctgctatggtccaagaacttcaccagggaggcaggaggtacatgatgatcgtagatccgggaatttcttcttctggcccagccggttcatacagaccgtatgacgaaggactgcgacgaggcgtctttatcacgaacgagactggtcagcctttgataggcaaggtttggccagggtccaccgctttcccggatttcacaaatcctgaggcactggcctggtgggaagatatggtcgccgagtttcacgaccaggtcccatttgacgggatgtggatcgacatgaacgagccatccaacttcattagaggaagtgtggatggctgtccgaataatgagctggaaaaccctccttacgtaccaggcgttgttggtgggactcttcaagctgcgacgatttgcgcatcctcccatcagttcctgtcaacccactataacttgcacaatctgtacgggacaacagaggctatcgccagtcatagggccctggtaaaagctagaggaacacgccctttcgttatctctcgctcaacttttgcaggccacggtaggtatgccggacattggaccggcgacgtctggagttcttgggaacagctggcttcctccgttccagagatattgcagtttaacctgttgggagtcccacttgtaggtgcagatgtttgtggcttcctggggaacacctcagaagaattgtgcgtaagatggactcaactgggcgccttctacccttttatgcgcaatcacaactcactgacatctttgcctcaagaaccgtactcatttagtgagccagcacagcaggccatgaggaaggctcttggcctgagatatgcacttctgccgcatctgtacacccttttccaccaggctcatgtccatggagagactgttgcacgacctctgttcttggagttcccaaaagactcttccacgtggacagtcgatcaccagatgctgtggggcgaggctctgctgattacacctgtattgcaacctggtaaggccgaagttaccgggtactttccattggggacctggtatgatctgcaaacagtcccggttgaagctcttggaagtcttccacctccacctgctgcaccaagggagcctgcgatccactctgaaggacagtgggtaactttgcctgcaccgctggacaccatcaatgtccatctgcgcgaaggctacatcataccacttcaaggtcctggactgaccactacagagtctagaaaacaaccaatggctcttgctgttgcactgactaaaagcggcgaagcaaggggtgagctgttctgggacgacggagagtcactggaggtactcgaacgaggcgcgtatacgcaggtcatttttgaggctcgcaataatacgatcgttaacgagctggtccacgtcacttcagaaggtgcaggccttcagttgggcaaggtaactgtcctgggagttgctacagcaccgcagcaggtcttgtccaacggacggcccgtaagcaactttacctatagtcctgataccaaagttctggacatctgcgttgctctgctgatgggtgagcagttcctggtatcatggtgc

SEQ ID NO: 170 - protein, 944 aa, synthetic construct
  REGION 1..944: note = Variant of the Homo Sapiens Lysosomal alpha-glucosidase
MEWSWVFLFFLSVTTGVHSGHILNHDFSTVPRELSGSSQVLEETHPAHQVGASRPGPRDAQLHPGRPRAVPTQCDVPENSRFDCAPEKAITQEQCEARGCCYIPAKQGLQGAQMGQPWCFFPPSYPSYKLENLSQSEMGYTATLTRTTPSFFPKDILTLRLDVMMETENRLHFTIKDPANRRYEVPLETPHVHSRAPSPLYSVEFSEEPFGVIVRRQLDGRVLLNTTVAPLFFADQFLQLSTSLPSQYITGLAEHLSPLMLSTSWNKITLWNRDLAPTPGANLYGSHPFYLALEDGGSAHGVFLLNSNAMDVVLQPSPALSWRSTGGILDVYIFLGPEPKSVVQQYLDVVGYPFMPPYWGLGFHLCRWGYSSTAITRQVVENMTRAHFPLDVQWNDLDYMDSRRDFTFNKDGFRDFPAMVQELHQGGRRYMMIVDPGISSSGPAGSYRPYDEGLRRGVFITNETGQPLIGKVWPGSTAFPDFTNPEALAWWEDMVAEFHDQVPFDGMWIDMNEPSNFIRGSVDGCPNNELENPPYVPGVVGGTLQAATICASSHQFLSTHYNLHNLYGTTEAIASHRALVKARGTRPFVISRSTFAGHGRYAGHWTGDVWSSWEQLASSVPEILQFNLLGVPLVGADVCGFLGNTSEELCVRWTQLGAFYPFMRNHNSLTSLPQEPYSFSEPAQQAMRKALGLRYALLPHLYTLFHQAHVHGETVARPLFLEFPKDSSTWTVDHQMLWGEALLITPVLQPGKAEVTGYFPLGTWYDLQTVPVEALGSLPPPPAAPREPAIHSEGQWVTLPAPLDTINVHLREGYIIPLQGPGLTTTESRKQPMALAVALTKSGEARGELFWDDGESLEVLERGAYTQVIFEARNNTIVNELVHVTSEGAGLQLGKVTVLGVATAPQQVLSNGRPVSNFTYSPDTKVLDICVALLMGEQFLVSWC

SEQ ID NO: 171 - DNA, 2832 bp, synthetic construct
  misc_feature 1..2832: note = Variant of the Homo Sapiens Lysosomal alpha-glucosidase
  source 1..2832: mol_type = other DNA
atggaatggagctgggtctttctcttcttcctgtcagtaacgactggtgtccactccggacacattctgtggcatgatttttctaccgtgcctagagagctttccggttcaagtcaagtcctcgaagaaacacatccagcccatcaggttggcgcatctaggccgggccctcgggacgctcaactccacccagggagacctagggccgttcccactcagtgcgacgtgccagagaactcacgcttcgattgtgcacctgagaaggctatcacgcaagagcagtgcgaggcccgcggatgttgttacataccggctaaacaggggctgcagggtgcgcagatgggccaaccttggtgcttcttcccaccatcctatccgagttacaagctggagaatctctcccagtctgaaatgggatataccgcaacactgactcggaccaccccctccttctttcccaaagatatcttgactctgagacttgacgtaatgatggagacagaaaacaggctccactttaccattaaggaccctgccaatcgccgatacgaggtgcctctggaaacaccacacgtgcacagtagagctccatcacctctgtattctgtcgagttctccgaagagccgtttggcgttatcgtcaggaggcagctcgacgggcgagtgcttctgaacacgactgtggccccgttgttctttgcggatcagtttctgcaactgtcaacaagtctcccttctcagtacattaccgggcttgcagagcatctgtccccactcatgctgagtacttcatggaacaaaatcacactgtggaatagagaccttgctcctactccaggagccaacttgtatggttctcaccctttctacttggccctggaagatggcggatcagcgcatggcgtattcctcctgaattccaacgcaatggacgttgttcttcagccatctcctgctttgagttggagatctacaggcgggatactggacgtctacatctttctgggtccagagcctaaatccgtagtgcagcagtatcttgatgtcgtcggatacccgtttatgccaccatattggggcctggggttccacttgtgccgctggggatattcatccaccgccattacacgacaagttgttgagaatatgaccagggcacattttcctctggatgtacagtggaacgacctggactacatggatagtcgccgcgacttcaccttcaataaggatgggttcagagactttcctgctatggtccaagaacttcaccagggaggcaggaggtacatgatgatcgtagatccgggaatttcttcttctggcccagccggttcatacagaccgtatgacgaaggactgcgacgaggcgtctttatcacgaacgagactggtcagcctttgataggcaaggtttggccagggtccaccgctttcccggatttcacaaatcctgaggcactggcctggtgggaagatatggtcgccgagtttcacgaccaggtcccatttgacgggatgtggatcgacatgaacgagccatccaacttcattagaggaagtgtggatggctgtccgaataatgagctggaaaaccctccttacgtaccaggcgttgttggtgggactcttcaagctgcgacgatttgcgcatcctcccatcagttcctgtcaacccactataacttgcacaatctgtacgggacaacagaggctatcgccagtcatagggccctggtaaaagctagaggaacacgccctttcgttatctctcgctcaacttttgcaggccacggtaggtatgccggacattggaccggcgacgtctggagttcttgggaacagctggcttcctccgttccagagatattgcagtttaacctgttgggagtcccacttgtaggtgcagatgtttgtggcttcctggggaacacctcagaagaattgtgcgtaagatggactcaactgggcgccttctacccttttatgcgcaatcacaactcactgacatctttgcctcaagaaccgtactcatttagtgagccagcacagcaggccatgaggaaggctcttggcctgagatatgcacttctgccgcatctgtacacccttttccaccaggctcatgtctggggagagactgttgcacgacctctgttcttggagttcccaaaagactcttccacgtggacagtcgatcaccagatgctgtggggcgaggctctgctgattacacctgtattgcaacctggtaaggccgaagttaccgggtactttccattggggacctggtatgatctgcaaacagtcccggttgaagctcttggaagtcttccacctccacctgctgcaccaagggagcctgcgatccactctgaaggacagtgggtaactttgcctgcaccgctggacaccatcaatgtccatctgcgcgaaggctacatcataccacttcaaggtcctggactgaccactacagagtctagaaaacaaccaatggctcttgctgttgcactgactaaaagcggcgaagcaaggggtgagctgttctgggacgacggagagtcactggaggtactcgaacgaggcgcgtatacgcaggtcatttttgaggctcgcaataatacgatcgttaacgagctggtccacgtcacttcagaaggtgcaggccttcagttgggcaaggtaactgtcctgggagttgctacagcaccgcagcaggtcttgtccaacggacggcccgtaagcaactttacctatagtcctgataccaaagttctggacatctgcgttgctctgctgatgggtgagcagttcctggtatcatggtgc

SEQ ID NO: 172 - protein, 944 aa, synthetic construct
  REGION 1..944: note = Variant of the Homo Sapiens Lysosomal alpha-glucosidase
MEWSWVFLFFLSVTTGVHSGHILWHDFSTVPRELSGSSQVLEETHPAHQVGASRPGPRDAQLHPGRPRAVPTQCDVPENSRFDCAPEKAITQEQCEARGCCYIPAKQGLQGAQMGQPWCFFPPSYPSYKLENLSQSEMGYTATLTRTTPSFFPKDILTLRLDVMMETENRLHFTIKDPANRRYEVPLETPHVHSRAPSPLYSVEFSEEPFGVIVRRQLDGRVLLNTTVAPLFFADQFLQLSTSLPSQYITGLAEHLSPLMLSTSWNKITLWNRDLAPTPGANLYGSHPFYLALEDGGSAHGVFLLNSNAMDVVLQPSPALSWRSTGGILDVYIFLGPEPKSVVQQYLDVVGYPFMPPYWGLGFHLCRWGYSSTAITRQVVENMTRAHFPLDVQWNDLDYMDSRRDFTFNKDGFRDFPAMVQELHQGGRRYMMIVDPGISSSGPAGSYRPYDEGLRRGVFITNETGQPLIGKVWPGSTAFPDFTNPEALAWWEDMVAEFHDQVPFDGMWIDMNEPSNFIRGSVDGCPNNELENPPYVPGVVGGTLQAATICASSHQFLSTHYNLHNLYGTTEAIASHRALVKARGTRPFVISRSTFAGHGRYAGHWTGDVWSSWEQLASSVPEILQFNLLGVPLVGADVCGFLGNTSEELCVRWTQLGAFYPFMRNHNSLTSLPQEPYSFSEPAQQAMRKALGLRYALLPHLYTLFHQAHVWGETVARPLFLEFPKDSSTWTVDHQMLWGEALLITPVLQPGKAEVTGYFPLGTWYDLQTVPVEALGSLPPPPAAPREPAIHSEGQWVTLPAPLDTINVHLREGYIIPLQGPGLTTTESRKQPMALAVALTKSGEARGELFWDDGESLEVLERGAYTQVIFEARNNTIVNELVHVTSEGAGLQLGKVTVLGVATAPQQVLSNGRPVSNFTYSPDTKVLDICVALLMGEQFLVSWC

SEQ ID NO: 173 - DNA, 2832 bp, synthetic construct
  misc_feature 1..2832: note = Variant of the Homo Sapiens Lysosomal alpha-glucosidase
  source 1..2832: mol_type = other DNA
atggaatggagctgggtctttctcttcttcctgtcagtaacgactggtgtccactccggacacattctgtggcatgatttttctaccgtgcctagagagctttccggttcaagtcaagtcctcgaagaaacacatccagcccatcaggttggcgcatctaggccgggccctcgggacgctcaactccacccagggagacctagggccgttcccactcagtgcgacgtgccagagaactcacgcttcgattgtgcacctgagaaggctatcacgcaagagcagtgcgaggcccgcggatgttgttacataccggctaaacaggggctgcagggtgcgcagatgggccaaccttggtgcttcttcccaccatcctatccgagttacaagctggagaatctctcccagtctgaaatgggatataccgcaacactgactcggaccaccccctccttctttcccaaagatatcttgactctgagacttgacgtaatgatggagacagaaaacaggctccactttaccattaaggaccctgccaatcgccgatacgaggtgcctctggaaacaccacacgtgcacagtagagctccatcacctctgtattctgtcgagttctccgaagagccgtttggcgttatcgtcaggaggcagctcgacgggcgagtgcttctgaacacgactgtggccccgttgttctttgcggatcagtttctgcaactgtcaacaagtctcccttctcagtacattaccgggcttgcagagcatctgtccccactcatgctgagtacttcatggaacaaaatcacactgtggaatagagaccttgctcctactccaggagccaacttgtatggttctcaccctttctacttggccctggaagatggcggatcagcgcatggcgtattcctcctgaattccaacgcaatggacgttgttcttcagccatctcctgctttgagttggagatctacaggcgggatactggacgtctacatctttctgggtccagagcctaaatccgtagtgcagcagtatcttgatgtcgtcggatacccgtttatgccaccatattggggcctggggttccacttgtgccgctggggatattcatccaccgccattacacgacaagttgttgagaatatgaccagggcacattttcctctggatgtacagtggaacgacctggactacatggatagtcgccgcgacttcaccttcaataaggatgggttcagagactttcctgctatggtccaagaacttcaccagggaggcaggaggtacatgatgatcgtagatccgggaatttcttcttctggcccagccggttcatacagaccgtatgacgaaggactgcgacgaggcgtctttatcacgaacgagactggtcagcctttgataggcaaggtttggccagggtccaccgctttcccggatttcacaaatcctgaggcactggcctggtgggaagatatggtcgccgagtttcacgaccaggtcccatttgacgggatgtggatcgacatgaacgagccatccaacttcattagaggaagtgtggatggctgtccgaataatgagctggaaaaccctccttacgtaccaggcgttgttggtgggactcttcaagctgcgacgatttgcgcatcctcccatcagttcctgtcaacccactataacttgcacaatctgtacgggacaacagaggctatcgccagtcatagggccctggtaaaagctagaggaacacgccctttcgttatctctcgctcaacttttgcaggccacggtaggtatgccggacattggaccggcgacgtctggagttcttgggaacagctggcttcctccgttccagagatattgcagtttaacctgttgggagtcccacttgtaggtgcagatgtttgtggcttcctggggaacacctcagaagaattgtgcgtaagatggactcaactgggcgccttctacccttttatgcgcaatcacaactcactgacatctttgcctcaagaaccgtactcatttagtgagccagcacagcaggccatgaggaaggctcttggcctgagatatgcacttctgccgcatctgtacacccttttccaccaggctcatgtccatggagagactgttgcacgacctctgttcttggagttcccaaaagactcttccacgtggacagtcgatcaccagatgctgtggggcgaggctctgctgattacacctgtattgcaacctggtaaggccgaagttaccgggtactttccattggggacctggtatgatctgcaaacagtcccggttgaagctcttggaagtcttccacctccacctgctgcaccaagggagcctgcgatccactctgaaggacagtgggtaactttgcctgcaccgctggacaccatcaatgtccatctgcgcgaaggctacatcataccacttcaaggtcctggactgaccactacagagtctagaaaacaaccaatggctcttgctgttgcactgactaaaagcggcgaagcaaggggtgagctgttctgggacgacggagagtcactggaggtactcgaacgaggcgcgtatacgcaggtcatttttcgggctcgcaataatacgatcgttaacgagctggtccacgtcacttcagaaggtgcaggccttcagttgggcaaggtaactgtcctgggagttgctacagcaccgcagcaggtcttgtccaacggacggcccgtaagcaactttacctatagtcctgataccaaagttctggacatctgcgttgctctgctgatgggtgagcagttcctggtatcatggtgc

SEQ ID NO: 174 - protein, 944 aa, synthetic construct
  REGION 1..944: note = Variant of the Homo Sapiens Lysosomal alpha-glucosidase
MEWSWVFLFFLSVTTGVHSGHILWHDFSTVPRELSGSSQVLEETHPAHQVGASRPGPRDAQLHPGRPRAVPTQCDVPENSRFDCAPEKAITQEQCEARGCCYIPAKQGLQGAQMGQPWCFFPPSYPSYKLENLSQSEMGYTATLTRTTPSFFPKDILTLRLDVMMETENRLHFTIKDPANRRYEVPLETPHVHSRAPSPLYSVEFSEEPFGVIVRRQLDGRVLLNTTVAPLFFADQFLQLSTSLPSQYITGLAEHLSPLMLSTSWNKITLWNRDLAPTPGANLYGSHPFYLALEDGGSAHGVFLLNSNAMDVVLQPSPALSWRSTGGILDVYIFLGPEPKSVVQQYLDVVGYPFMPPYWGLGFHLCRWGYSSTAITRQVVENMTRAHFPLDVQWNDLDYMDSRRDFTFNKDGFRDFPAMVQELHQGGRRYMMIVDPGISSSGPAGSYRPYDEGLRRGVFITNETGQPLIGKVWPGSTAFPDFTNPEALAWWEDMVAEFHDQVPFDGMWIDMNEPSNFIRGSVDGCPNNELENPPYVPGVVGGTLQAATICASSHQFLSTHYNLHNLYGTTEAIASHRALVKARGTRPFVISRSTFAGHGRYAGHWTGDVWSSWEQLASSVPEILQFNLLGVPLVGADVCGFLGNTSEELCVRWTQLGAFYPFMRNHNSLTSLPQEPYSFSEPAQQAMRKALGLRYALLPHLYTLFHQAHVHGETVARPLFLEFPKDSSTWTVDHQMLWGEALLITPVLQPGKAEVTGYFPLGTWYDLQTVPVEALGSLPPPPAAPREPAIHSEGQWVTLPAPLDTINVHLREGYIIPLQGPGLTTTESRKQPMALAVALTKSGEARGELFWDDGESLEVLERGAYTQVIFRARNNTIVNELVHVTSEGAGLQLGKVTVLGVATAPQQVLSNGRPVSNFTYSPDTKVLDICVALLMGEQFLVSWC

SEQ ID NO: 175 - DNA, 2832 bp, synthetic construct
  misc_feature 1..2832: note = Variant of the Homo Sapiens Lysosomal alpha-glucosidase
  source 1..2832: mol_type = other DNA
atggaatggagctgggtctttctcttcttcctgtcagtaacgactggtgtccactccggacacattctgtggcatgatttttctaccgtgcctagagagctttccggttcaagtcaagtcctcgaagaaacacatccagcccatcaggttggcgcatctaggccgggccctcgggacgctcaactccacccagggagacctagggccgttcccactcagtgcgacgtgccagagaactcacgcttcgattgtgcacctgagaaggctatcacgcaagagcagtgcgaggcccgcggatgttgttacataccggctaaacaggggctgcagggtgcgcagatgggccaaccttggtgcttcttcccaccatcctatccgagttacaagctggagaatctctcccagtctgaaatgggatataccgcaacactgactcggaccaccccctccttctttcccaaagatatcttgactctgagacttgacgtaatgatggagacagaaaacaggctccactttaccattaaggaccctgccaatcgccgatacgaggtgcctctggaaacaccacacgtgcacagtagagctccatcacctctgtattctgtcgagttctccgaagagccgtttggcgttatcgtcaggaggcagctcgacgggcgagtgcttctgaacacgactgtggccccgttgttctttgcggatcagtttctgcaactgtcaacaagtctcccttctcagtacattaccgggcttgcagagcatctgtccccactcatgctgagtacttcatggaacaaaatcacactgtggaatagagaccttgctcctactccaggagccaacttgtatggttctcaccctttctacttggccctggaagatggcggatcagcgcatggcgtattcctcctgaattccaacgcaatggacgttgttcttcagccatctcctgctttgagttggagatctacaggcgggatactggacgtctacatctttctgggtccagagcctaaatccgtagtgcagcagtatcttgatgtcgtcggatacccgtttatgccaccatattggggcctggggttccacttgtgccgctggggatattcatccaccgccattacacgacaagttgttgagaatatgaccagggcacattttcctctggatgtacagtggaacgacctggactacatggatagtcgccgcgacttcaccttcaataaggatgggttcagagactttcctgctatggtccaagaacttcaccagggaggcaggaggtacatgatgatcgtagatccgggaatttcttcttctggcccagccggttcatacagaccgtatgacgaaggactgcgacgaggcgtctttatcacgaacgagactggtcagcctttgataggcaaggtttggccagggtccaccgctttcccggatttcacaaatcctgaggcactggcctggtgggaagatatggtcgccgagtttcacgaccaggtcccatttgacgggatgtggatcgacatgaacgagccatccaacttcattagaggaagtgtggatggctgtccgaataatgagctggaaaaccctccttacgtaccaggcgttgttggtgggactcttcaagctgcgacgatttgcgcatcctcccatcagttcctgtcaacccactataacttgcacaatctgtacgggacaacagaggctatcgccagtcatagggccctggtaaaagctagaggaacacgccctttcgttatctctcgctcaacttttgcaggccacggtaggtatgccggacattggaccggcgacgtctggagttcttgggaacagctggcttcctccgttccagagatattgcagtttaacctgttgggagtcccacttgtaggtgcagatgtttgtggcttcctggggaacacctcagaagaattgtgcgtaagatggactcaactgggcgccttctacccttttatgcgcaatcacaactcactgacatctttgcctcaagaaccgtactcatttagtgagccagcacagcaggccatgaggaaggctcttggcctgagatatgcacttctgccgcatctgtacacccttttccaccaggctcatgtccatggagagactgttgcacgacctctgttcttggagttcccaaaagactcttccacgtggacagtcgatcaccagctgctgtggggcgaggctctgctgattacacctgtattgcaacctggtaaggccgaagttaccgggtactttccattggggacctggtatgatctgcaaacagtcccggttgaagctcttggaagtcttccacctccacctgctgcaccaagggagcctgcgatccactctgaaggacagtgggtaactttgcctgcaccgctggacaccatcaatgtccatctgcgcgaaggctacatcataccacttcaaggtcctggactgaccactacagagtctagaaaacaaccaatggctcttgctgttgcactgactaaaagcggcgaagcaaggggtgagctgttctgggacgacggagagtcactggaggtactcgaacgaggcgcgtatacgcaggtcatttttgaggctcgcaataatacgatcgttaacgagctggtccacgtcacttcagaaggtgcaggccttcagttgggcaaggtaactgtcctgggagttgctacagcaccgcagcaggtcttgtccaacggacggcccgtaagcaactttacctatagtcctgataccaaagttctggacatctgcgttgctctgctgatgggtgagcagttcctggtatcatggtgc

SEQ ID NO: 176 - protein, 944 aa, synthetic construct
  REGION 1..944: note = Variant of the Homo Sapiens Lysosomal alpha-glucosidase
MEWSWVFLFFLSVTTGVHSGHILWHDFSTVPRELSGSSQVLEETHPAHQVGASRPGPRDAQLHPGRPRAVPTQCDVPENSRFDCAPEKAITQEQCEARGCCYIPAKQGLQGAQMGQPWCFFPPSYPSYKLENLSQSEMGYTATLTRTTPSFFPKDILTLRLDVMMETENRLHFTIKDPANRRYEVPLETPHVHSRAPSPLYSVEFSEEPFGVIVRRQLDGRVLLNTTVAPLFFADQFLQLSTSLPSQYITGLAEHLSPLMLSTSWNKITLWNRDLAPTPGANLYGSHPFYLALEDGGSAHGVFLLNSNAMDVVLQPSPALSWRSTGGILDVYIFLGPEPKSVVQQYLDVVGYPFMPPYWGLGFHLCRWGYSSTAITRQVVENMTRAHFPLDVQWNDLDYMDSRRDFTFNKDGFRDFPAMVQELHQGGRRYMMIVDPGISSSGPAGSYRPYDEGLRRGVFITNETGQPLIGKVWPGSTAFPDFTNPEALAWWEDMVAEFHDQVPFDGMWIDMNEPSNFIRGSVDGCPNNELENPPYVPGVVGGTLQAATICASSHQFLSTHYNLHNLYGTTEAIASHRALVKARGTRPFVISRSTFAGHGRYAGHWTGDVWSSWEQLASSVPEILQFNLLGVPLVGADVCGFLGNTSEELCVRWTQLGAFYPFMRNHNSLTSLPQEPYSFSEPAQQAMRKALGLRYALLPHLYTLFHQAHVHGETVARPLFLEFPKDSSTWTVDHQLLWGEALLITPVLQPGKAEVTGYFPLGTWYDLQTVPVEALGSLPPPPAAPREPAIHSEGQWVTLPAPLDTINVHLREGYIIPLQGPGLTTTESRKQPMALAVALTKSGEARGELFWDDGESLEVLERGAYTQVIFEARNNTIVNELVHVTSEGAGLQLGKVTVLGVATAPQQVLSNGRPVSNFTYSPDTKVLDICVALLMGEQFLVSWC

SEQ ID NO: 177 - DNA, 2832 bp, synthetic construct
  misc_feature 1..2832: note = Variant of the Homo Sapiens Lysosomal alpha-glucosidase
  source 1..2832: mol_type = other DNA
atggaatggagctgggtctttctcttcttcctgtcagtaacgactggtgtccactccggacacattctgtggcatgatttttctaccgtgcctagagagctttccggttcaagtcaagtcctcgaagaaacacatccagcccatcaggttggcgcatctaggccgggccctcgggacgctcaactccacccagggagacctagggccgttcccactcagtgcgacgtgccagagaactcacgcttcgattgtgcacctgagaaggctatcacgcaagagcagtgcgaggcccgcggatgttgttacataccggctaaacaggggctgcagggtgcgcagatgggccaaccttggtgcttcttcccaccatcctatccgagttacaagctggagaatctctcccagtctgaaatgggatataccgcaacactgactcggaccaccccctccttctttcccaaagatatcttgactctgagacttgacgtaatgatggagacagaaaacaggctccactttaccattaaggaccctgccaatcgccgatacgaggtgcctctggaaacaccacacgtgcacagtagagctccatcacctctgtattctgtcgagttctccgaagagccgtttggcgttatcgtcaggaggcagctcgacgggcgagtgcttctgaacacgactgtggccccgttgttctttgcggatcagtttctgcaactgtcaacaagtctcccttctcagtacattaccgggcttgcagagcatctgtccccactcatgctgagtacttcatggaacaaaatcacactgtggaatagagaccttgctcctactccaggagccaacttgtatggttctcaccctttctacttggccctggaagatggcggatcagcgcatggcgtattcctcctgaattccaacgcaatggacgttgttcttcagccatctcctgctttgagttggagatctacaggcgggatactggacgtctacatctttctgggtccagagcctaaatccgtagtgcagcagtatcttgatgtcgtcggatacccgtttatgccaccatattggggcctggggttccacttgtgccgctggggatattcatccaccgccattacacgacaagttgttgagaatatgaccagggcacattttcctctggatgtacagtggaacgacctggactacatggatagtcgccgcgacttcaccttcaataaggatgggttcagagactttcctgctatggtccaagaacttcaccagggaggcaggaggtacatgatgatcgtagatccgggaatttcttcttctggcccagccggttcatacagaccgtatgacgaaggactgcgacgaggcgtctttatcacgaacgagactggtcagcctttgataggcaaggtttggccagggtccaccgctttcccggatttcacaaatcctgaggcactggcctggtgggaagatatggtcgccgagtttcacgaccaggtcccatttgacgggatgtggatcgacatgaacgagccatccaacttcattagaggaagttgggatggctgtccgaataatgagctggaaaaccctccttacgtaccaggcgttgttggtgggactcttcaagctgcgacgatttgcgcatcctcccatcagttcctgtcaacccactataacttgcacaatctgtacgggacaacagaggctatcgccagtcatagggccctggtaaaagctagaggaacacgccctttcgttatctctcgctcaacttttgcaggccacggtaggtatgccggacattggaccggcgacgtctggagttcttgggaacagctggcttcctccgttccagagatattgcagtttaacctgttgggagtcccacttgtaggtgcagatgtttgtggcttcctggggaacacctcagaagaattgtgcgtaagatggactcaactgggcgccttctacccttttatgcgcaatcacaactcactgacatctttgcctcaagaaccgtactcatttagtgagccagcacagcaggccatgaggaaggctcttggcctgagatatgcacttctgccgcatctgtacacccttttccaccaggctcatgtccatggagagactgttgcacgacctctgttcttggagttcccaaaagactcttccacgtggacagtcgatcaccagatgctgtggggcgaggctctgctgattacacctgtattgcaacctggtaaggccgaagttaccgggtactttccattggggacctggtatgatctgcaaacagtcccggttgaagctcttggaagtcttccacctccacctgctgcaccaagggagcctgcgatccactctgaaggacagtgggtaactttgcctgcaccgctggacaccatcaatgtccatctgcgcgaaggctacatcataccacttcaaggtcctggactgaccactacagagtctagaaaacaaccaatggctcttgctgttgcactgactaaaagcggcgaagcaaggggtgagctgttctgggacgacggagagtcactggaggtactcgaacgaggcgcgtatacgcaggtcatttttgaggctcgcaataatacgatcgttaacgagctggtccacgtcacttcagaaggtgcaggccttcagttgggcaaggtaactgtcctgggagttgctacagcaccgcagcaggtcttgtccaacggacggcccgtaagcaactttacctatagtcctgataccaaagttctggacatctgcgttgctctgctgatgggtgagcagttcctggtatcatggtgc

SEQ ID NO: 178 - protein, 944 aa, synthetic construct
  REGION 1..944: note = Variant of the Homo Sapiens Lysosomal alpha-glucosidase
MEWSWVFLFFLSVTTGVHSGHILWHDFSTVPRELSGSSQVLEETHPAHQVGASRPGPRDAQLHPGRPRAVPTQCDVPENSRFDCAPEKAITQEQCEARGCCYIPAKQGLQGAQMGQPWCFFPPSYPSYKLENLSQSEMGYTATLTRTTPSFFPKDILTLRLDVMMETENRLHFTIKDPANRRYEVPLETPHVHSRAPSPLYSVEFSEEPFGVIVRRQLDGRVLLNTTVAPLFFADQFLQLSTSLPSQYITGLAEHLSPLMLSTSWNKITLWNRDLAPTPGANLYGSHPFYLALEDGGSAHGVFLLNSNAMDVVLQPSPALSWRSTGGILDVYIFLGPEPKSVVQQYLDVVGYPFMPPYWGLGFHLCRWGYSSTAITRQVVENMTRAHFPLDVQWNDLDYMDSRRDFTFNKDGFRDFPAMVQELHQGGRRYMMIVDPGISSSGPAGSYRPYDEGLRRGVFITNETGQPLIGKVWPGSTAFPDFTNPEALAWWEDMVAEFHDQVPFDGMWIDMNEPSNFIRGSWDGCPNNELENPPYVPGVVGGTLQAATICASSHQFLSTHYNLHNLYGTTEAIASHRALVKARGTRPFVISRSTFAGHGRYAGHWTGDVWSSWEQLASSVPEILQFNLLGVPLVGADVCGFLGNTSEELCVRWTQLGAFYPFMRNHNSLTSLPQEPYSFSEPAQQAMRKALGLRYALLPHLYTLFHQAHVHGETVARPLFLEFPKDSSTWTVDHQMLWGEALLITPVLQPGKAEVTGYFPLGTWYDLQTVPVEALGSLPPPPAAPREPAIHSEGQWVTLPAPLDTINVHLREGYIIPLQGPGLTTTESRKQPMALAVALTKSGEARGELFWDDGESLEVLERGAYTQVIFEARNNTIVNELVHVTSEGAGLQLGKVTVLGVATAPQQVLSNGRPVSNFTYSPDTKVLDICVALLMGEQFLVSWC

SEQ ID NO: 179 - DNA, 2832 bp, synthetic construct
  misc_feature 1..2832: note = Variant of the Homo Sapiens Lysosomal alpha-glucosidase
  source 1..2832: mol_type = other DNA
atggaatggagctgggtctttctcttcttcctgtcagtaacgactggtgtccactccggacacattctgtggcatgatttttctaccgtgcctagagagctttccggttcaagtcaagtcctcgaagaaacacatccagcccatcaggttggcgcatctaggccgggccctcgggacgctcaactccacccagggagacctagggccgttcccactcagtgcgacgtgccagagaactcacgcttcgattgtgcacctgagaaggctatcacgcaagagcagtgcgaggcccgcggatgttgttacataccggctaaacaggggctgcagggtgcgcagatgggccaaccttggtgcttcttcccaccatcctatccgagttacaagctggagaatctctcccagtctgaaatgggatataccgcaacactgactcggaccaccccctccttctttcccaaagatatcttgactctgagacttgacgtaatgatggagacagaaaacaggctccactttaccattaaggaccctgccaatcgccgatacgaggtgcctctggaaacaccacacgtgcacagtagagctccatcacctctgtattctgtcgagttctccgaagagccgtttggcgttatcgtcaggaggcagctcgacgggcgagtgcttctgaacacgactgtggccccgttgttctttgcggatcagtttctgcaactgtcaacaagtctcccttctcagtacattaccgggcttgcagagcatctgtccccactcatgctgagtacttcatggaacaaaatcacactgtggaatagagaccttgctcctactccaggagccaacttgtatggttctcaccctttctacttggccctggaagatggcggatcagcgcatggcgtattcctcctgaattccaacgcaatggacgttgttcttcagccatctcctgctttgagttggagatctacaggcgggatactggacgtctacatctttctgggtccagagcctaaatccgtagtgcagcagtatcttgatgtcgtcggatacccgtttatgccaccatattggggcctggggttccacttgtgccgctggggatattcatccaccgccattacacgacaagttgttgagaatatgaccagggcacattttcctctggatgtacagtggaacgacctggactacatggatagtcgccgcgacttcaccttcaataaggatgggttcagagactttcctgctatggtccaagaacttcaccagggaggcaggaggtacatgatgatcgtagatccgggaatttcttcttctggcccagccggttcatacagaccgtatgacgaaggactgcgacgaggcgtctttatcacgaacgagactggtcagcctttgataggcaaggtttggccagggtccaccgctttcccggatttcacaaatcctgaggcactggcctggtgggaagatatggtcgccgagtttcacgaccaggtcccatttgacgggatgtggatcgacatgaacgagccatccaacttcattagaggaagtgtggatggctgtccgaataatgagctggaaaaccctccttacgtaccaggcgttgttggtgggactcttcaagctgcgacgatttgcgcatcctcccatcagttcctgtcaacccactataacttgcacaatctgtacgggacaacagaggctatcgccagtcatagggccctggtaaaagctagaggaacacgccctttcgttatctctcgctcaacttttgcaggccacggtaggtatgccggacattggaccggcgacgtctggagttcttgggaacagctggcttcctccgttccagagatattgcagtttaacctgttgggagtcccacttgtaggtgcagatgtttgtggcttcctggggaacacctcagaagaattgtgcgtaagatggactcaactgggcgccttctacccttttatgcgcaatcacaactcactgacatctttgcctcaagaaccgtactcatttagtgagccagcacagcaggccatgaggaaggctcttggcctgagatatgcacttctgccgcatctgtacacccttttccaccaggctcatgtccatggagagactgttgcacgacctctgttcttggagttcccaaaagactcttccacgtggacagtcgatcaccagatgctgtggggcgaggctctgctgattacacctgtattgcaacctggtaaggccgaagttaccgggtactttccattggggacctggtatgatctgcaaacagtcccggttgaagctcttggaagtcttccacctccacctgctgcaccaagggagcctgcgatccactctgaaggacagtgggtaactttgcctgcaccgctggacaccatcaatgtccatctgcgcgaaggctacatcataccacttcaaggtcctggactgaccactacagagtctagaaaacaaccaatggctcttgctgttgcactgactaaaagcggcgaagcaaggggtgagctgttctgggacgacggagagtcactggaggtactcgaacgaggcgcgtatacgcaggtcatttttgaggctcgcaataatacgatcgttaacgagctggtccacgtcacttcagaaggtgcaggccttcagttgctgaaggtaactgtcctgggagttgctacagcaccgcagcaggtcttgtccaacggacggcccgtaagcaactttacctatagtcctgataccaaagttctggacatctgcgttgctctgctgatgggtgagcagttcctggtatcatggtgc

SEQ ID NO: 180 - protein, 944 aa, synthetic construct
  REGION 1..944: note = Variant of the Homo Sapiens Lysosomal alpha-glucosidase
MEWSWVFLFFLSVTTGVHSGHILWHDFSTVPRELSGSSQVLEETHPAHQVGASRPGPRDAQLHPGRPRAVPTQCDVPENSRFDCAPEKAITQEQCEARGCCYIPAKQGLQGAQMGQPWCFFPPSYPSYKLENLSQSEMGYTATLTRTTPSFFPKDILTLRLDVMMETENRLHFTIKDPANRRYEVPLETPHVHSRAPSPLYSVEFSEEPFGVIVRRQLDGRVLLNTTVAPLFFADQFLQLSTSLPSQYITGLAEHLSPLMLSTSWNKITLWNRDLAPTPGANLYGSHPFYLALEDGGSAHGVFLLNSNAMDVVLQPSPALSWRSTGGILDVYIFLGPEPKSVVQQYLDVVGYPFMPPYWGLGFHLCRWGYSSTAITRQVVENMTRAHFPLDVQWNDLDYMDSRRDFTFNKDGFRDFPAMVQELHQGGRRYMMIVDPGISSSGPAGSYRPYDEGLRRGVFITNETGQPLIGKVWPGSTAFPDFTNPEALAWWEDMVAEFHDQVPFDGMWIDMNEPSNFIRGSVDGCPNNELENPPYVPGVVGGTLQAATICASSHQFLSTHYNLHNLYGTTEAIASHRALVKARGTRPFVISRSTFAGHGRYAGHWTGDVWSSWEQLASSVPEILQFNLLGVPLVGADVCGFLGNTSEELCVRWTQLGAFYPFMRNHNSLTSLPQEPYSFSEPAQQAMRKALGLRYALLPHLYTLFHQAHVHGETVARPLFLEFPKDSSTWTVDHQMLWGEALLITPVLQPGKAEVTGYFPLGTWYDLQTVPVEALGSLPPPPAAPREPAIHSEGQWVTLPAPLDTINVHLREGYIIPLQGPGLTTTESRKQPMALAVALTKSGEARGELFWDDGESLEVLERGAYTQVIFEARNNTIVNELVHVTSEGAGLQLLKVTVLGVATAPQQVLSNGRPVSNFTYSPDTKVLDICVALLMGEQFLVSWC

SEQ ID NO: 181 - DNA, 2832 bp, synthetic construct
  misc_feature 1..2832: note = Variant of the Homo Sapiens Lysosomal alpha-glucosidase
  source 1..2832: mol_type = other DNA
atggaatggagctgggtctttctcttcttcctgtcagtaacgactggtgtccactccggacacattctgtggcatgatttttctaccgtgcctagagagctttccggttcaagtcaagtcctcgaagaaacacatccagcccatcaggttggcgcatctaggccgggccctcgggacgctcaactccacccagggagacctagggccgttcccactcagtgcgacgtgccagagaactcacgcttcgattgtgcacctgagaaggctatcacgcaagagcagtgcgaggcccgcggatgttgttacataccggctaaacaggggctgcagggtgcgcagatgggccaaccttggtgcttcttcccaccatcctatccgagttacaagctggagaatctctcccagtctgaaatgggatataccgcaacactgactcggaccaccccctccttctttcccaaagatatcttgactctgagacttgacgtaatgatggagacagaaaacaggctccactttaccattaaggaccctgccaatcgccgatacgaggtgcctctggaaacaccacacgtgcacagtagagctccatcacctctgtattctgtcgagttctccgaagagccgtttggcgttatcgtcaggaggcagctcgacgggcgagtgcttctgaacacgactgtggccccgttgttctttgcggatcagtttctgcaactgtcaacaagtctcccttctcagtacattaccgggcttgcagagcatctgtccccactcatgctgagtacttcatggaacaaaatcacactgtggaatagagaccttgctcctactccaggagccaacttgtatggttctcaccctttctacttggccctggaagatggcggatcagcgcatggcgtattcctcctgaattccaacgcaatggacgttgttcttcagccatctcctgctttgagttggagatctacaggcgggatactggacgtctacatctttctgggtccagagcctaaatccgtagtgcagcagtatcttgatgtcgtcggatacccgtttatgccaccatattggggcctggggttccacttgtgccgctggggatattcatccaccgccattacacgacaagttgttgagaatatgaccagggcacattttcctctggatgtacagtggaacgacctggactacatggatagtcgccgcgacttcaccttcaataaggatgggttcagagactttcctgctatggtccaagaacttcaccagggaggcaggaggtacatgatgatcgtagatccgggaatttcttcttctggcccagccggttcatacagaccgtatgacgaaggactgcgacgaggcgtctttatcacgaacgagactggtcagcctttgataggcaaggtttggccagggtccaccgctttcccggatttcacaaatcctgaggcactggcctggtgggaagatatggtcgccgagtttcacgaccaggtcccatttgacgggatgtggatcgacatgaacgagccatccaacttcattagaggaagtgtggatggctgtccgaataatgagctggaaaaccctccttacgtaccaggcgttgttggtgggactcttcaagctgcgacgatttgcgcatcctcccatcagttcctgtcaacccactataacttgcacaatctgtacgggacaacagaggctatcgccagtcatagggccctggtaaaagctagaggaacacgccctttcgttatctctcgctcaacttttgcaggccacggtaggtatgccggacattggaccggcgacgtctggagttcttgggaacagctggcttcctccgttccagagatattgcagtttaacctgttgggagtcccacttgtaggtgcagatgtttgtggcttcctggggaacacctcagaagaattgtgcgtaagatggactcaactgggcgccttctacccttttatgcgcaatcacaactcactgacatctttgcctcaagaaccgtactcatttagtgagccagcacagcaggccatgaggaaggctcttggcctgagatatgcacttctgccgcatctgtacacccttttccaccaggctcatgtccatggagagactgttgcacgacctctgttcttggagttcccaaaagactcttccacgtggacagtcgatcaccagatgctgtggggcgaggctctgctgattacacctgtattgcaacctggtaaggccgaagttaccgggtactttccattggggacctggtatgatctgcaaacagtcccggttgaagctcttggaagtcttccacctccacctgctgcaccaagggagcctgcgatccactctgaaggacagtgggtaactttgcctgcaccgctggacaccatcaatgtccatctgcgcgaaggctacatcataccacttcaaggtcctggactgaccactacagagtctagaaaacaaccaatggctcttgctgttgcactgactaaaagcggcgaagcaaggggtgagctgttctgggacgacggagagtcactggaggtactcgaacgaggcgcgtatacgcaggtcatttttgaggctcgcaataatacgatcgttaacgagctggtcgctgtcacttcagaaggtgcaggccttcagttgggcaaggtaactgtcctgggagttgctacagcaccgcagcaggtcttgtccaacggacggcccgtaagcaactttacctatagtcctgataccaaagttctggacatctgcgttgctctgctgatgggtgagcagttcctggtatcatggtgc

SEQ ID NO: 182 - protein, 944 aa, synthetic construct
  REGION 1..944: note = Variant of the Homo Sapiens Lysosomal alpha-glucosidase
MEWSWVFLFFLSVTTGVHSGHILWHDFSTVPRELSGSSQVLEETHPAHQVGASRPGPRDAQLHPGRPRAVPTQCDVPENSRFDCAPEKAITQEQCEARGCCYIPAKQGLQGAQMGQPWCFFPPSYPSYKLENLSQSEMGYTATLTRTTPSFFPKDILTLRLDVMMETENRLHFTIKDPANRRYEVPLETPHVHSRAPSPLYSVEFSEEPFGVIVRRQLDGRVLLNTTVAPLFFADQFLQLSTSLPSQYITGLAEHLSPLMLSTSWNKITLWNRDLAPTPGANLYGSHPFYLALEDGGSAHGVFLLNSNAMDVVLQPSPALSWRSTGGILDVYIFLGPEPKSVVQQYLDVVGYPFMPPYWGLGFHLCRWGYSSTAITRQVVENMTRAHFPLDVQWNDLDYMDSRRDFTFNKDGFRDFPAMVQELHQGGRRYMMIVDPGISSSGPAGSYRPYDEGLRRGVFITNETGQPLIGKVWPGSTAFPDFTNPEALAWWEDMVAEFHDQVPFDGMWIDMNEPSNFIRGSVDGCPNNELENPPYVPGVVGGTLQAATICASSHQFLSTHYNLHNLYGTTEAIASHRALVKARGTRPFVISRSTFAGHGRYAGHWTGDVWSSWEQLASSVPEILQFNLLGVPLVGADVCGFLGNTSEELCVRWTQLGAFYPFMRNHNSLTSLPQEPYSFSEPAQQAMRKALGLRYALLPHLYTLFHQAHVHGETVARPLFLEFPKDSSTWTVDHQMLWGEALLITPVLQPGKAEVTGYFPLGTWYDLQTVPVEALGSLPPPPAAPREPAIHSEGQWVTLPAPLDTINVHLREGYIIPLQGPGLTTTESRKQPMALAVALTKSGEARGELFWDDGESLEVLERGAYTQVIFEARNNTIVNELVAVTSEGAGLQLGKVTVLGVATAPQQVLSNGRPVSNFTYSPDTKVLDICVALLMGEQFLVSWC

SEQ ID NO: 183 - DNA, 2832 bp, synthetic construct
  misc_feature 1..2832: note = Variant of the Homo Sapiens Lysosomal alpha-glucosidase
  source 1..2832: mol_type = other DNA
atggaatggagctgggtctttctcttcttcctgtcagtaacgactggtgtccactccggacacattctgtggcatgatttttctaccgtgcctagagagctttccggttcaagtcaagtcctcgaagaaacacatccagcccatcaggttggcgcatctaggccgggccctcgggacgctcaactccacccagggagacctagggccgttcccactcagtgcgacgtgccagagaactcacgcttcgattgtgcacctgagaaggctatcacgcaagagcagtgcgaggcccgcggatgttgttacataccggctaaacaggggctgcagggtgcgcagatgggccaaccttggtgcttcttcccaccatcctatccgagttacaagctggagaatctctcccagtctgaaatgggatataccgcaacactgactcggaccaccccctccttctttcccaaagatatcttgactctgagacttgacgtaatgatggagacagaaaacaggctccactttaccattaaggaccctgccaatcgccgatacgaggtgcctctggaaacaccacacgtgcacagtagagctccatcacctctgtattctgtcgagttctccgaagagccgtttggcgttatcgtcaggaggcagctcgacgggcgagtgcttctgaacacgactgtggccccgttgttctttgcggatcagtttctgcaactgtcaacaagtctcccttctcagtacattaccgggcttgcagagcatctgtccccactcatgctgagtacttcatggaacaaaatcacactgtggaatagagaccttgctcctactccaggagccaacttgtatggttctcaccctttctacttggccctggaagatggcggatcagcgcatggcgtattcctcctgaattccaacgcaatggacgttgttcttcagccatctcctgctttgagttggagatctacaggcgggatactggacgtctacatctttctgggtccagagcctaaatccgtagtgcagcagtatcttgatgtcgtcggatacccgtttatgccaccatattggggcctggggttccacttgtgccgctggggatattcatccaccgccattacacgacaagttgttgagaatatgaccagggcacattttcctctggatgtacagtggaacgacctggactacatggatagtcgccgcgacttcaccttcaataaggatgggttcagagactttcctgctatggtccaagaacttcaccagggaggcaggaggtacatgatgatcgtagatccgggaatttcttcttctggcccagccggttcatacagaccgtatgacgaaggactgcgacgaggcgtctttatcacgaacgagactggtcagcctttgataggcaaggtttggccagggtccaccgctttcccggatttcacaaatcctgaggcactggcctggtgggaagatatggtcgccgagtttcacgaccaggtcccatttgacgggatgtggatcgacatgaacgagccatccaacttcattagaggaagtggggatggctgtccgaataatgagctggaaaaccctccttacgtaccaggcgttgttggtgggactcttcaagctgcgacgatttgcgcatcctcccatcagttcctgtcaacccactataacttgcacaatctgtacgggacaacagaggctatcgccagtcatagggccctggtaaaagctagaggaacacgccctttcgttatctctcgctcaacttttgcaggccacggtaggtatgccggacattggaccggcgacgtctggagttcttgggaacagctggcttcctccgttccagagatattgcagtttaacctgttgggagtcccacttgtaggtgcagatgtttgtggcttcctggggaacacctcagaagaattgtgcgtaagatggactcaactgggcgccttctacccttttatgcgcaatcacaactcactgacatctttgcctcaagaaccgtactcatttagtgagccagcacagcaggccatgaggaaggctcttggcctgagatatgcacttctgccgcatctgtacacccttttccaccaggctcatgtccatggagagactgttgcacgacctctgttcttggagttcccaaaagactcttccacgtggacagtcgatcaccagatgctgtggggcgaggctctgctgattacacctgtattgcaacctggtaaggccgaagttaccgggtactttccattggggacctggtatgatctgcaaacagtcccggttgaagctcttggaagtcttccacctccacctgctgcaccaagggagcctgcgatccactctgaaggacagtgggtaactttgcctgcaccgctggacaccatcaatgtccatctgcgcgaaggctacatcataccacttcaaggtcctggactgaccactacagagtctagaaaacaaccaatggctcttgctgttgcactgactaaaagcggcgaagcaaggggtgagctgttctgggacgacggagagtcactggaggtactcgaacgaggcgcgtatacgcaggtcatttttgaggctcgcaataatacgatcgttaacgagctggtccacgtcacttcagaaggtgcaggccttcagttgggcaaggtaactgtcctgggagttgctacagcaccgcagcaggtcttgtccaacggacggcccgtaagcaactttacctatagtcctgataccaaagttctggacatctgcgttgctctgctgatgggtgagcagttcctggtatcatggtgc

SEQ ID NO: 184 - protein, 944 aa, synthetic construct
  REGION 1..944: note = Variant of the Homo Sapiens Lysosomal alpha-glucosidase
MEWSWVFLFFLSVTTGVHSGHILWHDFSTVPRELSGSSQVLEETHPAHQVGASRPGPRDAQLHPGRPRAVPTQCDVPENSRFDCAPEKAITQEQCEARGCCYIPAKQGLQGAQMGQPWCFFPPSYPSYKLENLSQSEMGYTATLTRTTPSFFPKDILTLRLDVMMETENRLHFTIKDPANRRYEVPLETPHVHSRAPSPLYSVEFSEEPFGVIVRRQLDGRVLLNTTVAPLFFADQFLQLSTSLPSQYITGLAEHLSPLMLSTSWNKITLWNRDLAPTPGANLYGSHPFYLALEDGGSAHGVFLLNSNAMDVVLQPSPALSWRSTGGILDVYIFLGPEPKSVVQQYLDVVGYPFMPPYWGLGFHLCRWGYSSTAITRQVVENMTRAHFPLDVQWNDLDYMDSRRDFTFNKDGFRDFPAMVQELHQGGRRYMMIVDPGISSSGPAGSYRPYDEGLRRGVFITNETGQPLIGKVWPGSTAFPDFTNPEALAWWEDMVAEFHDQVPFDGMWIDMNEPSNFIRGSGDGCPNNELENPPYVPGVVGGTLQAATICASSHQFLSTHYNLHNLYGTTEAIASHRALVKARGTRPFVISRSTFAGHGRYAGHWTGDVWSSWEQLASSVPEILQFNLLGVPLVGADVCGFLGNTSEELCVRWTQLGAFYPFMRNHNSLTSLPQEPYSFSEPAQQAMRKALGLRYALLPHLYTLFHQAHVHGETVARPLFLEFPKDSSTWTVDHQMLWGEALLITPVLQPGKAEVTGYFPLGTWYDLQTVPVEALGSLPPPPAAPREPAIHSEGQWVTLPAPLDTINVHLREGYIIPLQGPGLTTTESRKQPMALAVALTKSGEARGELFWDDGESLEVLERGAYTQVIFEARNNTIVNELVHVTSEGAGLQLGKVTVLGVATAPQQVLSNGRPVSNFTYSPDTKVLDICVALLMGEQFLVSWC

SEQ ID NO: 185 - DNA, 2832 bp, synthetic construct
  misc_feature 1..2832: note = Variant of the Homo Sapiens Lysosomal alpha-glucosidase
  source 1..2832: mol_type = other DNA
atggaatggagctgggtctttctcttcttcctgtcagtaacgactggtgtccactccggacacattctgtggcatgatttttctaccgtgcctagagagctttccggttcaagtcaagtcctcgaagaaacacatccagcccatcaggttggcgcatctaggccgggccctcgggacgctcaactccacccagggagacctagggccgttcccactcagtgcgacgtgccagagaactcacgcttcgattgtgcacctgagaaggctatcacgcaagagcagtgcgaggcccgcggatgttgttacataccggctaaacaggggctgcagggtgcgcagatgggccaaccttggtgcttcttcccaccatcctatccgagttacaagctggagaatctctcccagtctgaaatgggatataccgcaacactgactcggaccaccccctccttctttcccaaagatatcttgactctgagacttgacgtaatgatggagacagaaaacaggctccactttaccattaaggaccctgccaatcgccgatacgaggtgcctctggaaacaccacacgtgcacagtagagctccatcacctctgtattctgtcgagttctccgaagagccgtttggcgttatcgtcaggaggcagctcgacgggcgagtgcttctgaacacgactgtggccccgttgttctttgcggatcagtttctgcaactgtcaacaagtctcccttctcagtacattaccgggcttgcagagcatctgtccccactcatgctgagtacttcatggaacaaaatcacactgtggaatagagaccttgctcctactccaggagccaacttgtatggttctcaccctttctacttggccctggaagatggcggatcagcgcatggcgtattcctcctgaattccaacgcaatggacgttgttcttcagccatctcctgctttgagttggagatctacaggcgggatactggacgtctacatctttctgggtccagagcctaaatccgtagtgcagcagtatcttgatgtcgtcggatacccgtttatgccaccatattggggcctggggttccacttgtgccgctggggatattcatccaccgccattacacgacaagttgttgagaatatgaccagggcacattttcctctggatgtacagtggaacgacctggactacatggatagtcgccgcgacttcaccttcaataaggatgggttcagagactttcctgctatggtccaagaacttcaccagggaggcaggaggtacatgatgatcgtagatccgggaatttcttcttctggcccagccggttcatacagaccgtatgacgaaggactgcgacgaggcgtctttatcacgaacgagactggtcagcctttgataggcaaggtttggccagggtccaccgctttcccggatttcacaaatcctgaggcactggcctggtgggaagatatggtcgccgagtttcacgaccaggtcccatttgacgggatgtggatcgacatgaacgagccatccaacttcattagaggaagtcttgatggctgtccgaataatgagctggaaaaccctccttacgtaccaggcgttgttggtgggactcttcaagctgcgacgatttgcgcatcctcccatcagttcctgtcaacccactataacttgcacaatctgtacgggacaacagaggctatcgccagtcatagggccctggtaaaagctagaggaacacgccctttcgttatctctcgctcaacttttgcaggccacggtaggtatgccggacattggaccggcgacgtctggagttcttgggaacagctggcttcctccgttccagagatattgcagtttaacctgttgggagtcccacttgtaggtgcagatgtttgtggcttcctggggaacacctcagaagaattgtgcgtaagatggactcaactgggcgccttctacccttttatgcgcaatcacaactcactgacatctttgcctcaagaaccgtactcatttagtgagccagcacagcaggccatgaggaaggctcttggcctgagatatgcacttctgccgcatctgtacacccttttccaccaggctcatgtccatggagagactgttgcacgacctctgttcttggagttcccaaaagactcttccacgtggacagtcgatcaccagatgctgtggggcgaggctctgctgattacacctgtattgcaacctggtaaggccgaagttaccgggtactttccattggggacctggtatgatctgcaaacagtcccggttgaagctcttggaagtcttccacctccacctgctgcaccaagggagcctgcgatccactctgaaggacagtgggtaactttgcctgcaccgctggacaccatcaatgtccatctgcgcgaaggctacatcataccacttcaaggtcctggactgaccactacagagtctagaaaacaaccaatggctcttgctgttgcactgactaaaagcggcgaagcaaggggtgagctgttctgggacgacggagagtcactggaggtactcgaacgaggcgcgtatacgcaggtcatttttgaggctcgcaataatacgatcgttaacgagctggtccacgtcacttcagaaggtgcaggccttcagttgggcaaggtaactgtcctgggagttgctacagcaccgcagcaggtcttgtccaacggacggcccgtaagcaactttacctatagtcctgataccaaagttctggacatctgcgttgctctgctgatgggtgagcagttcctggtatcatggtgc

SEQ ID NO: 186 - protein, 944 aa, synthetic construct
  REGION 1..944: note = Variant of the Homo Sapiens Lysosomal alpha-glucosidase
MEWSWVFLFFLSVTTGVHSGHILWHDFSTVPRELSGSSQVLEETHPAHQVGASRPGPRDAQLHPGRPRAVPTQCDVPENSRFDCAPEKAITQEQCEARGCCYIPAKQGLQGAQMGQPWCFFPPSYPSYKLENLSQSEMGYTATLTRTTPSFFPKDILTLRLDVMMETENRLHFTIKDPANRRYEVPLETPHVHSRAPSPLYSVEFSEEPFGVIVRRQLDGRVLLNTTVAPLFFADQFLQLSTSLPSQYITGLAEHLSPLMLSTSWNKITLWNRDLAPTPGANLYGSHPFYLALEDGGSAHGVFLLNSNAMDVVLQPSPALSWRSTGGILDVYIFLGPEPKSVVQQYLDVVGYPFMPPYWGLGFHLCRWGYSSTAITRQVVENMTRAHFPLDVQWNDLDYMDSRRDFTFNKDGFRDFPAMVQELHQGGRRYMMIVDPGISSSGPAGSYRPYDEGLRRGVFITNETGQPLIGKVWPGSTAFPDFTNPEALAWWEDMVAEFHDQVPFDGMWIDMNEPSNFIRGSLDGCPNNELENPPYVPGVVGGTLQAATICASSHQFLSTHYNLHNLYGTTEAIASHRALVKARGTRPFVISRSTFAGHGRYAGHWTGDVWSSWEQLASSVPEILQFNLLGVPLVGADVCGFLGNTSEELCVRWTQLGAFYPFMRNHNSLTSLPQEPYSFSEPAQQAMRKALGLRYALLPHLYTLFHQAHVHGETVARPLFLEFPKDSSTWTVDHQMLWGEALLITPVLQPGKAEVTGYFPLGTWYDLQTVPVEALGSLPPPPAAPREPAIHSEGQWVTLPAPLDTINVHLREGYIIPLQGPGLTTTESRKQPMALAVALTKSGEARGELFWDDGESLEVLERGAYTQVIFEARNNTIVNELVHVTSEGAGLQLGKVTVLGVATAPQQVLSNGRPVSNFTYSPDTKVLDICVALLMGEQFLVSWC

SEQ ID NO: 187 - DNA, 2832 bp, synthetic construct
  misc_feature 1..2832: note = Variant of the Homo Sapiens Lysosomal alpha-glucosidase
  source 1..2832: mol_type = other DNA
atggaatggagctgggtctttctcttcttcctgtcagtaacgactggtgtccactccggacacattctgtggcatgatttttctaccgtgcctagagagctttccggttcaagtcaagtcctcgaagaaacacatccagcccatcaggttggcgcatctaggccgggccctcgggacgctcaactccacccagggagacctagggccgttcccactcagtgcgacgtgccagagaactcacgcttcgattgtgcacctgagaaggctatcacgcaagagcagtgcgaggcccgcggatgttgttacataccggctaaacaggggctgcagggtgcgcagatgggccaaccttggtgcttcttcccaccatcctatccgagttacaagctggagaatctctcccagtctgaaatgggatataccgcaacactgactcggaccaccccctccttctttcccaaagatatcttgactctgagacttgacgtaatgatggagacagaaaacaggctccactttaccattaaggaccctgccaatcgccgatacgaggtgcctctggaaacaccacacgtgcacagtagagctccatcacctctgtattctgtcgagttctccgaagagccgtttggcgttatcgtcaggaggcagctcgacgggcgagtgcttctgaacacgactgtggccccgttgttctttgcggatcagtttctgcaactgtcaacaagtctcccttctcagtacattaccgggcttgcagagcatctgtccccactcatgctgagtacttcatggaacaaaatcacactgtggaatagagaccttgctcctactccaggagccaacttgtatggttctcaccctttctacttggccctggaagatggcggatcagcgcatggcgtattcctcctgaattccaacgcaatggacgttgttcttcagccatctcctgctttgagttggagatctacaggcgggatactggacgtctacatctttctgggtccagagcctaaatccgtagtgcagcagtatcttgatgtcgtcggatacccgtttatgccaccatattggggcctggggttccacttgtgccgctggggatattcatccaccgccattacacgacaagttgttgagaatatgaccagggcacattttcctctggatgtacagtggaacgacctggactacatggatagtcgccgcgacttcaccttcaataaggatgggttcagagactttcctgctatggtccaagaacttcaccagggaggcaggaggtacatgatgatcgtagatccgggaatttcttcttctggcccagccggttcatacagaccgtatgacgaaggactgcgacgaggcgtctttatcacgaacgagactggtcagcctttgataggcaaggtttggccagggtccaccgctttcccggatttcacaaatcctgaggcactggcctggtgggaagatatggtcgccgagtttcacgaccaggtcccatttgacgggatgtggatcgacatgaacgagccatccaacttcattagaggaagtgtggatggctgtccgaataatgagctggaaaaccctccttacgtaccaggcgttgttggtgggactcttcaagctgcgacgatttgcgcatcctcccatcagttcctgtcaacccactataacttgcacaatctgtacgggacaacagaggctatcgccagtcatagggccctggtaaaagctagaggaacacgccctttcgttatctctcgctcaacttttgcaggccacggtaggtatgccggacattggaccggcgacgtctggagttcttgggaacagctggcttcctccgttccagagatattgcagtttaacctgttgggagtcccacttgtaggtgcagatgtttgtggcttcctggggaacacctcagaagaattgtgcgtaagatggactcaactgggcgccttctacccttttatgcgcaatcacaactcactggtgtctttgcctcaagaaccgtactcatttagtgagccagcacagcaggccatgaggaaggctcttggcctgagatatgcacttctgccgcatctgtacacccttttccaccaggctcatgtccatggagagactgttgcacgacctctgttcttggagttcccaaaagactcttccacgtggacagtcgatcaccagatgctgtggggcgaggctctgctgattacacctgtattgcaacctggtaaggccgaagttaccgggtactttccattggggacctggtatgatctgcaaacagtcccggttgaagctcttggaagtcttccacctccacctgctgcaccaagggagcctgcgatccactctgaaggacagtgggtaactttgcctgcaccgctggacaccatcaatgtccatctgcgcgaaggctacatcataccacttcaaggtcctggactgaccactacagagtctagaaaacaaccaatggctcttgctgttgcactgactaaaagcggcgaagcaaggggtgagctgttctgggacgacggagagtcactggaggtactcgaacgaggcgcgtatacgcaggtcatttttgaggctcgcaataatacgatcgttaacgagctggtccacgtcacttcagaaggtgcaggccttcagttgggcaaggtaactgtcctgggagttgctacagcaccgcagcaggtcttgtccaacggacggcccgtaagcaactttacctatagtcctgataccaaagttctggacatctgcgttgctctgctgatgggtgagcagttcctggtatcatggtgc

SEQ ID NO: 188 - protein, 944 aa, synthetic construct
  REGION 1..944: note = Variant of the Homo Sapiens Lysosomal alpha-glucosidase
MEWSWVFLFFLSVTTGVHSGHILWHDFSTVPRELSGSSQVLEETHPAHQVGASRPGPRDAQLHPGRPRAVPTQCDVPENSRFDCAPEKAITQEQCEARGCCYIPAKQGLQGAQMGQPWCFFPPSYPSYKLENLSQSEMGYTATLTRTTPSFFPKDILTLRLDVMMETENRLHFTIKDPANRRYEVPLETPHVHSRAPSPLYSVEFSEEPFGVIVRRQLDGRVLLNTTVAPLFFADQFLQLSTSLPSQYITGLAEHLSPLMLSTSWNKITLWNRDLAPTPGANLYGSHPFYLALEDGGSAHGVFLLNSNAMDVVLQPSPALSWRSTGGILDVYIFLGPEPKSVVQQYLDVVGYPFMPPYWGLGFHLCRWGYSSTAITRQVVENMTRAHFPLDVQWNDLDYMDSRRDFTFNKDGFRDFPAMVQELHQGGRRYMMIVDPGISSSGPAGSYRPYDEGLRRGVFITNETGQPLIGKVWPGSTAFPDFTNPEALAWWEDMVAEFHDQVPFDGMWIDMNEPSNFIRGSVDGCPNNELENPPYVPGVVGGTLQAATICASSHQFLSTHYNLHNLYGTTEAIASHRALVKARGTRPFVISRSTFAGHGRYAGHWTGDVWSSWEQLASSVPEILQFNLLGVPLVGADVCGFLGNTSEELCVRWTQLGAFYPFMRNHNSLVSLPQEPYSFSEPAQQAMRKALGLRYALLPHLYTLFHQAHVHGETVARPLFLEFPKDSSTWTVDHQMLWGEALLITPVLQPGKAEVTGYFPLGTWYDLQTVPVEALGSLPPPPAAPREPAIHSEGQWVTLPAPLDTINVHLREGYIIPLQGPGLTTTESRKQPMALAVALTKSGEARGELFWDDGESLEVLERGAYTQVIFEARNNTIVNELVHVTSEGAGLQLGKVTVLGVATAPQQVLSNGRPVSNFTYSPDTKVLDICVALLMGEQFLVSWC

SEQ ID NO: 189 - DNA, 2832 bp, synthetic construct
  misc_feature 1..2832: note = Variant of the Homo Sapiens Lysosomal alpha-glucosidase
  source 1..2832: mol_type = other DNA
atggaatggagctgggtctttctcttcttcctgtcagtaacgactggtgtccactccggacacattctgtggcatgatttttctaccgtgcctagagagctttccggttcaagtcaagtcctcgaagaaacacatccagcccatcaggttggcgcatctaggccgggccctcgggacgctcaagggcacccagggagacctagggccgttcccactcagtgcgacgtgccagagaactcacgcttcgattgtgcacctgagaaggctatcacgcaagagcagtgcgaggcccgcggatgttgttacataccggctaaacaggggctgcagggtgcgcagatgggccaaccttggtgcttcttcccaccatcctatccgagttacaagctggagaatctctcccagtctgaaatgggatataccgcaacactgactcggaccaccccctccttctttcccaaagatatcttgactctgagacttgacgtaatgatggagacagaaaacaggctccactttaccattaaggaccctgccaatcgccgatacgaggtgcctctggaaacaccacacgtgcacagtagagctccatcacctctgtattctgtcgagttctccgaagagccgtttggcgttatcgtcaggaggcagctcgacgggcgagtgcttctgaacacgactgtggccccgttgttctttgcggatcagtttctgcaactgtcaacaagtctcccttctcagtacattaccgggcttgcagagcatctgtccccactcatgctgagtacttcatggaacaaaatcacactgtggaatagagaccttgctcctactccaggagccaacttgtatggttctcaccctttctacttggccctggaagatggcggatcagcgcatggcgtattcctcctgaattccaacgcaatggacgttgttcttcagccatctcctgctttgagttggagatctacaggcgggatactggacgtctacatctttctgggtccagagcctaaatccgtagtgcagcagtatcttgatgtcgtcggatacccgtttatgccaccatattggggcctggggttccacttgtgccgctggggatattcatccaccgccattacacgacaagttgttgagaatatgaccagggcacattttcctctggatgtacagtggaacgacctggactacatggatagtcgccgcgacttcaccttcaataaggatgggttcagagactttcctgctatggtccaagaacttcaccagggaggcaggaggtacatgatgatcgtagatccgggaatttcttcttctggcccagccggttcatacagaccgtatgacgaaggactgcgacgaggcgtctttatcacgaacgagactggtcagcctttgataggcaaggtttggccagggtccaccgctttcccggatttcacaaatcctgaggcactggcctggtgggaagatatggtcgccgagtttcacgaccaggtcccatttgacgggatgtggatcgacatgaacgagccatccaacttcattagaggaagtgtggatggctgtccgaataatgagctggaaaaccctccttacgtaccaggcgttgttggtgggactcttcaagctgcgacgatttgcgcatcctcccatcagttcctgtcaacccactataacttgcacaatctgtacgggacaacagaggctatcgccagtcatagggccctggtaaaagctagaggaacacgccctttcgttatctctcgctcaacttttgcaggccacggtaggtatgccggacattggaccggcgacgtctggagttcttgggaacagctggcttcctccgttccagagatattgcagtttaacctgttgggagtcccacttgtaggtgcagatgtttgtggcttcctggggaacacctcagaagaattgtgcgtaagatggactcaactgggcgccttctacccttttatgcgcaatcacaactcactgacatctttgcctcaagaaccgtactcatttagtgagccagcacagcaggccatgaggaaggctcttggcctgagatatgcacttctgccgcatctgtacacccttttccaccaggctcatgtccatggagagactgttgcacgacctctgttcttggagttcccaaaagactcttccacgtggacagtcgatcaccagatgctgtggggcgaggctctgctgattacacctgtattgcaacctggtaaggccgaagttaccgggtactttccattggggacctggtatgatctgcaaacagtcccggttgaagctcttggaagtcttccacctccacctgctgcaccaagggagcctgcgatccactctgaaggacagtgggtaactttgcctgcaccgctggacaccatcaatgtccatctgcgcgaaggctacatcataccacttcaaggtcctggactgaccactacagagtctagaaaacaaccaatggctcttgctgttgcactgactaaaagcggcgaagcaaggggtgagctgttctgggacgacggagagtcactggaggtactcgaacgaggcgcgtatacgcaggtcatttttgaggctcgcaataatacgatcgttaacgagctggtccacgtcacttcagaaggtgcaggccttcagttgggcaaggtaactgtcctgggagttgctacagcaccgcagcaggtcttgtccaacggacggcccgtaagcaactttacctatagtcctgataccaaagttctggacatctgcgttgctctgctgatgggtgagcagttcctggtatcatggtgc

SEQ ID NO: 190 - protein, 944 aa, synthetic construct
  REGION 1..944: note = Variant of the Homo Sapiens Lysosomal alpha-glucosidase
MEWSWVFLFFLSVTTGVHSGHILWHDFSTVPRELSGSSQVLEETHPAHQVGASRPGPRDAQGHPGRPRAVPTQCDVPENSRFDCAPEKAITQEQCEARGCCYIPAKQGLQGAQMGQPWCFFPPSYPSYKLENLSQSEMGYTATLTRTTPSFFPKDILTLRLDVMMETENRLHFTIKDPANRRYEVPLETPHVHSRAPSPLYSVEFSEEPFGVIVRRQLDGRVLLNTTVAPLFFADQFLQLSTSLPSQYITGLAEHLSPLMLSTSWNKITLWNRDLAPTPGANLYGSHPFYLALEDGGSAHGVFLLNSNAMDVVLQPSPALSWRSTGGILDVYIFLGPEPKSVVQQYLDVVGYPFMPPYWGLGFHLCRWGYSSTAITRQVVENMTRAHFPLDVQWNDLDYMDSRRDFTFNKDGFRDFPAMVQELHQGGRRYMMIVDPGISSSGPAGSYRPYDEGLRRGVFITNETGQPLIGKVWPGSTAFPDFTNPEALAWWEDMVAEFHDQVPFDGMWIDMNEPSNFIRGSVDGCPNNELENPPYVPGVVGGTLQAATICASSHQFLSTHYNLHNLYGTTEAIASHRALVKARGTRPFVISRSTFAGHGRYAGHWTGDVWSSWEQLASSVPEILQFNLLGVPLVGADVCGFLGNTSEELCVRWTQLGAFYPFMRNHNSLTSLPQEPYSFSEPAQQAMRKALGLRYALLPHLYTLFHQAHVHGETVARPLFLEFPKDSSTWTVDHQMLWGEALLITPVLQPGKAEVTGYFPLGTWYDLQTVPVEALGSLPPPPAAPREPAIHSEGQWVTLPAPLDTINVHLREGYIIPLQGPGLTTTESRKQPMALAVALTKSGEARGELFWDDGESLEVLERGAYTQVIFEARNNTIVNELVHVTSEGAGLQLGKVTVLGVATAPQQVLSNGRPVSNFTYSPDTKVLDICVALLMGEQFLVSWC

SEQ ID NO: 191 - DNA, 2832 bp, synthetic construct
  misc_feature 1..2832: note = Variant of the Homo Sapiens Lysosomal alpha-glucosidase
  source 1..2832: mol_type = other DNA
atggaatggagctgggtctttctcttcttcctgtcagtaacgactggtgtccactccggacacattctgtggcatgatttttctaccgtgcctagagagctttccggttcaagtcaagtcctcgaagaaacacatccagcccatcaggttggcgcatctaggccgggccctcgggacgctcaactccacccagggagacctagggccgttcccactcagtgcgacgtgccagagaactcacgcttcgattgtgcacctgagaaggctatcacgcaagagcagtgcgaggcccgcggatgttgttacataccggctaaacaggggctgcagggtgcgcagatgggccaaccttggtgcttcttcccaccatcctatccgagttacaagctggagaatctctcccagtctgaaatgggatataccgcaacactgactcggaccaccccctccttctttcccaaagatatcttgactctgagacttgacgtaatgatggagacagaaaacaggctccactttaccattaaggaccctgccaatcgccgatacgaggtgcctctggaaacaccacacgtgcacagtagagctccatcacctctgtattctgtcgagttctccgaagagccgtttggcgttatcgtcaggaggcagctcgacgggcgagtgcttctgaacacgactgtggccccgttgttctttgcggatcagtttctgcaactgtcaacaagtctcccttctcagtacattaccgggcttgcagagcatctgtccccactcatgctgagtacttcatggaacaaaatcacactgtggaatagagaccttgctcctactccaggagccaacttgtatggttctcaccctttctacttggccctggaagatggcggatcagcgcatggcgtattcctcctgaattccaacgcaatggacgttgttcttcagccatctcctgctttgagttggagatctacaggcgggatactggacgtctacatctttctgggtccagagcctaaatccgtagtgcagcagtatcttgatgtcgtcggatacccgtttatgccaccatattggggcctggggttccacttgtgccgctggggatattcatccaccgccattacacgacaagttgttgagaatatgaccagggcacattttcctctggatgtacagtggaacgacctggactacatggatagtcgccgcgacttcaccttcaataaggatgggttcagagactttcctgctatggtccaagaacttcaccagggaggcaggaggtacatgatgatcgtagatccgggaatttcttcttctggcccagccggttcatacagaccgtatgacgaaggactgcgacgaggcgtctttatcacgaacgagactggtcagcctttgataggcaaggtttggccagggtccaccgctttcccggatttcacaaatcctgaggcactggcctggtgggaagatatggtcgccgagtttcacgaccaggtcccatttgacgggatgtggatcgacatgaacgagccatccaacttcattagaggaagtgtggatggctgtccgaataatgagctggaaaaccctccttacgtaccaggcgttgttggtgggactcttcaagctgcgacgatttgcgcatcctcccatcagttcctgtcaacccactataacttgcacaatctgtacgggacaacagaggctatcgccagtcatagggccctggtaaaagctagaggaacacgccctttcgttatctctcgctcaacttttgcaggccacggtaggtatgccggacattggaccggcgacgtctggagttcttgggaacagctggcttcctccgttccagagatattgcagtttaacctgttgggagtcccacttgtaggtgcagatgtttgtggcttcctggggaacacctcagaagaattgtgcgtaagatggactcaactgggcgccttctacccttttatgcgcaatcacaactcactgacatctttgcctcaagaaccgtactcatttagtgagccagcacagcaggccatgaggaaggctcttaatctgagatatgcacttctgccgcatctgtacacccttttccaccaggctcatgtccatggagagactgttgcacgacctctgttcttggagttcccaaaagactcttccacgtggacagtcgatcaccagatgctgtggggcgaggctctgctgattacacctgtattgcaacctggtaaggccgaagttaccgggtactttccattggggacctggtatgatctgcaaacagtcccggttgaagctcttggaagtcttccacctccacctgctgcaccaagggagcctgcgatccactctgaaggacagtgggtaactttgcctgcaccgctggacaccatcaatgtccatctgcgcgaaggctacatcataccacttcaaggtcctggactgaccactacagagtctagaaaacaaccaatggctcttgctgttgcactgactaaaagcggcgaagcaaggggtgagctgttctgggacgacggagagtcactggaggtactcgaacgaggcgcgtatacgcaggtcatttttgaggctcgcaataatacgatcgttaacgagctggtccacgtcacttcagaaggtgcaggccttcagttgggcaaggtaactgtcctgggagttgctacagcaccgcagcaggtcttgtccaacggacggcccgtaagcaactttacctatagtcctgataccaaagttctggacatctgcgttgctctgctgatgggtgagcagttcctggtatcatggtgc

SEQ ID NO: 192 - protein, 944 aa, synthetic construct
  REGION 1..944: note = Variant of the Homo Sapiens Lysosomal alpha-glucosidase
MEWSWVFLFFLSVTTGVHSGHILWHDFSTVPRELSGSSQVLEETHPAHQVGASRPGPRDAQLHPGRPRAVPTQCDVPENSRFDCAPEKAITQEQCEARGCCYIPAKQGLQGAQMGQPWCFFPPSYPSYKLENLSQSEMGYTATLTRTTPSFFPKDILTLRLDVMMETENRLHFTIKDPANRRYEVPLETPHVHSRAPSPLYSVEFSEEPFGVIVRRQLDGRVLLNTTVAPLFFADQFLQLSTSLPSQYITGLAEHLSPLMLSTSWNKITLWNRDLAPTPGANLYGSHPFYLALEDGGSAHGVFLLNSNAMDVVLQPSPALSWRSTGGILDVYIFLGPEPKSVVQQYLDVVGYPFMPPYWGLGFHLCRWGYSSTAITRQVVENMTRAHFPLDVQWNDLDYMDSRRDFTFNKDGFRDFPAMVQELHQGGRRYMMIVDPGISSSGPAGSYRPYDEGLRRGVFITNETGQPLIGKVWPGSTAFPDFTNPEALAWWEDMVAEFHDQVPFDGMWIDMNEPSNFIRGSVDGCPNNELENPPYVPGVVGGTLQAATICASSHQFLSTHYNLHNLYGTTEAIASHRALVKARGTRPFVISRSTFAGHGRYAGHWTGDVWSSWEQLASSVPEILQFNLLGVPLVGADVCGFLGNTSEELCVRWTQLGAFYPFMRNHNSLTSLPQEPYSFSEPAQQAMRKALNLRYALLPHLYTLFHQAHVHGETVARPLFLEFPKDSSTWTVDHQMLWGEALLITPVLQPGKAEVTGYFPLGTWYDLQTVPVEALGSLPPPPAAPREPAIHSEGQWVTLPAPLDTINVHLREGYIIPLQGPGLTTTESRKQPMALAVALTKSGEARGELFWDDGESLEVLERGAYTQVIFEARNNTIVNELVHVTSEGAGLQLGKVTVLGVATAPQQVLSNGRPVSNFTYSPDTKVLDICVALLMGEQFLVSWC

SEQ ID NO: 193 - DNA, 2832 bp, synthetic construct
  misc_feature 1..2832: note = Variant of the Homo Sapiens Lysosomal alpha-glucosidase
  source 1..2832: mol_type = other DNA
atggaatggagctgggtctttctcttcttcctgtcagtaacgactggtgtccactccggacacattctgtggcatgatttttctaccgtgcctagagagctttccggttcaagtcaagtcctcgaagaaacacatccagcccatcaggttggcgcatctaggccgggccctcgggacgctcaactccacccagggagacctagggccgttcccactcagtgcgacgtgccagagaactcacgcttcgattgtgcacctgagaaggctatcacgcaagagcagtgcgaggcccgcggatgttgttacataccggctaaacaggggctgcagggtgcgcagatgggccaaccttggtgcttcttcccaccatcctatccgagttacaagctggagaatctctcccagtctgaaatgggatataccgcaacactgactcggaccaccccctccttctttcccaaagatatcttgactctgagacttgacgtaatgatggagacagaaaacaggctccactttaccattaaggaccctgccaatcgccgatacgaggtgcctctggaaacaccacacgtgcacagtagagctccatcacctctgtattctgtcgagttctccgaagagccgtttggcgttatcgtcaggaggcagctcgacgggcgagtgcttctgaacacgactgtggccccgttgttctttgcggatcagtttctgcaactgtcaacaagtctcccttctcagtacattaccgggcttgcagagcatctgtccccactcatgctgagtacttcatggaacaaaatcacactgtggaatagagaccttgctcctactccaggagccaacttgtatggttctcaccctttctacttggccctggaagatggcggatcagcgcatggcgtattcctcctgaattccaacgcaatggacgttgttcttcagccatctcctgctttgagttggagatctacaggcgggatactggacgtctacatctttctgggtccagagcctaaatccgtagtgcagcagtatcttgatgtcgtcggatacccgtttatgccaccatattggggcctggggttccacttgtgccgctggggatattcatccaccgccattacacgacaagttgttgagaatatgaccagggcacattttcctctggatgtacagtggaacgacctggactacatggatagtcgccgcgacttcaccttcaataaggatgggttcagagactttcctgctatggtccaagaacttcaccagggaggcaggaggtacatgatgatcgtagatccgggaatttcttcttctggcccagccggttcatacagaccgtatgacgaaggactgcgacgaggcgtctttatcacgaacgagactggtcagcctttgataggcaaggtttggccagggtccaccgctttcccggatttcacaaatcctgaggcactggcctggtgggaagatatggtcgccgagtttcacgaccaggtcccatttgacgggatgtggatcgacatgaacgagccatccaacttcattagaggaagtgtggatggctgtccgaataatgagctggaaaaccctccttacgtaccaggcgttgttggtgggactcttcaagctgcgacgatttgcgcatcctcccatcagttcctgtcaacccactataacttgcacaatctgtacggggttacagaggctatcgccagtcatagggccctggtaaaagctagaggaacacgccctttcgttatctctcgctcaacttttgcaggccacggtaggtatgccggacattggaccggcgacgtctggagttcttgggaacagctggcttcctccgttccagagatattgcagtttaacctgttgggagtcccacttgtaggtgcagatgtttgtggcttcctggggaacacctcagaagaattgtgcgtaagatggactcaactgggcgccttctacccttttatgcgcaatcacaactcactgacatctttgcctcaagaaccgtactcatttagtgagccagcacagcaggccatgaggaaggctcttggcctgagatatgcacttctgccgcatctgtacacccttttccaccaggctcatgtccatggagagactgttgcacgacctctgttcttggagttcccaaaagactcttccacgtggacagtcgatcaccagatgctgtggggcgaggctctgctgattacacctgtattgcaacctggtaaggccgaagttaccgggtactttccattggggacctggtatgatctgcaaacagtcccggttgaagctcttggaagtcttccacctccacctgctgcaccaagggagcctgcgatccactctgaaggacagtgggtaactttgcctgcaccgctggacaccatcaatgtccatctgcgcgaaggctacatcataccacttcaaggtcctggactgaccactacagagtctagaaaacaaccaatggctcttgctgttgcactgactaaaagcggcgaagcaaggggtgagctgttctgggacgacggagagtcactggaggtactcgaacgaggcgcgtatacgcaggtcatttttgaggctcgcaataatacgatcgttaacgagctggtccacgtcacttcagaaggtgcaggccttcagttgggcaaggtaactgtcctgggagttgctacagcaccgcagcaggtcttgtccaacggacggcccgtaagcaactttacctatagtcctgataccaaagttctggacatctgcgttgctctgctgatgggtgagcagttcctggtatcatggtgc

SEQ ID NO: 194 - protein, 944 aa, synthetic construct
  REGION 1..944: note = Variant of the Homo Sapiens Lysosomal alpha-glucosidase
MEWSWVFLFFLSVTTGVHSGHILWHDFSTVPRELSGSSQVLEETHPAHQVGASRPGPRDAQLHPGRPRAVPTQCDVPENSRFDCAPEKAITQEQCEARGCCYIPAKQGLQGAQMGQPWCFFPPSYPSYKLENLSQSEMGYTATLTRTTPSFFPKDILTLRLDVMMETENRLHFTIKDPANRRYEVPLETPHVHSRAPSPLYSVEFSEEPFGVIVRRQLDGRVLLNTTVAPLFFADQFLQLSTSLPSQYITGLAEHLSPLMLSTSWNKITLWNRDLAPTPGANLYGSHPFYLALEDGGSAHGVFLLNSNAMDVVLQPSPALSWRSTGGILDVYIFLGPEPKSVVQQYLDVVGYPFMPPYWGLGFHLCRWGYSSTAITRQVVENMTRAHFPLDVQWNDLDYMDSRRDFTFNKDGFRDFPAMVQELHQGGRRYMMIVDPGISSSGPAGSYRPYDEGLRRGVFITNETGQPLIGKVWPGSTAFPDFTNPEALAWWEDMVAEFHDQVPFDGMWIDMNEPSNFIRGSVDGCPNNELENPPYVPGVVGGTLQAATICASSHQFLSTHYNLHNLYGVTEAIASHRALVKARGTRPFVISRSTFAGHGRYAGHWTGDVWSSWEQLASSVPEILQFNLLGVPLVGADVCGFLGNTSEELCVRWTQLGAFYPFMRNHNSLTSLPQEPYSFSEPAQQAMRKALGLRYALLPHLYTLFHQAHVHGETVARPLFLEFPKDSSTWTVDHQMLWGEALLITPVLQPGKAEVTGYFPLGTWYDLQTVPVEALGSLPPPPAAPREPAIHSEGQWVTLPAPLDTINVHLREGYIIPLQGPGLTTTESRKQPMALAVALTKSGEARGELFWDDGESLEVLERGAYTQVIFEARNNTIVNELVHVTSEGAGLQLGKVTVLGVATAPQQVLSNGRPVSNFTYSPDTKVLDICVALLMGEQFLVSWC

SEQ ID NO: 195 - DNA, 2832 bp, synthetic construct
  misc_feature 1..2832: note = Variant of the Homo Sapiens Lysosomal alpha-glucosidase
  source 1..2832: mol_type = other DNA
atggaatggagctgggtctttctcttcttcctgtcagtaacgactggtgtccactccggacacattctgtggcatgatttttctaccgtgcctagagagctttccggttcaagtcaagtcctcgaagaaacacatccagcccatcaggttggcgcatctaggccgggccctcgggacgctcaactccacccagggagacctagggccgttcccactcagtgcgacgtgccagagaactcacgcttcgattgtgcacctgagaaggctatcacgcaagagcagtgcgaggcccgcggatgttgttacataccggctaaacaggggctgcagggtgcgcagatgggccaaccttggtgcttcttcccaccatcctatccgagttacaagctggagaatctctcccagtctgaaatgggatataccgcaacactgactcggaccaccccctccttctttcccaaagatatcttgactctgagacttgacgtaatgatggagacagaaaacaggctccactttaccattaaggaccctgccaatcgccgatacgaggtgcctctggaaacaccacacgtgcacagtagagctccatcacctctgtattctgtcgagttctccgaagagccgtttggcgttatcgtcaggaggcagctcgacgggcgagtgcttctgaacacgactgtggccccgttgttctttgcggatcagtttctgcaactgtcaacaagtctcccttctcagtacattaccgggcttgcagagcatctgtccccactcatgctgagtacttcatggaacaaaatcacactgtggaatagagaccttgctcctactccaggagccaacttgtatggttctcaccctttctacttggccctggaagatggcggatcagcgcatggcgtattcctcctgaattccaacgcaatggacgttgttcttcagccatctcctgctttgagttggagatctacaggcgggatactggacgtctacatctttctgggtccagagcctaaatccgtagtgcagcagtatcttgatgtcgtcggatacccgtttatgccaccatattggggcctggggttccacttgtgccgctggggatattcatccaccgccattacacgacaagttgttgagaatatgaccagggcacattttcctctggatgtacagtggaacgacctggactacatggatagtcgccgcgacttcaccttcaataaggatgggttcagagactttcctgctatggtccaagaacttcaccagggaggcaggaggtacatgatgatcgtagatccgggaatttcttcttctggcccagccggttcatacagaccgtatgacgaaggactgcgacgaggcgtctttatcacgaacgagactggtcagcctttgataggcaaggtttggccagggtccaccgctttcccggatttcacaaatcctgaggcactggcctggtgggaagatatggtcgccgagtttcacgaccaggtcccatttgacgggatgtggatcgacatgaacgagccatccaacttcattagaggaagtgtggatggctgtccgaataatgagctggaaaaccctccttacgtaccaggcgttgttggtgggactcttcaagctgcgacgatttgcgcatcctcccatcagttcctgtcaacccactataacttgcacaatctgtacgggacaacagaggctatcgccagtcatagggccctggtaaaagctagaggaacacgccctttcgttatctctcgctcaacttttgcaggccacggtaggtatgccggacattggaccggcgacgtctggagttcttgggaacagctggcttcctccgttccagagatattgcagtttaacctgttgggagtcccacttgtaggtgcagatgtttgtggcttcctggggaacacctcagaagaattgtgcgtaagatggactcaactgggcgccttctacccttttatgcgcaatcacaactcactgatttctttgcctcaagaaccgtactcatttagtgagccagcacagcaggccatgaggaaggctcttggcctgagatatgcacttctgccgcatctgtacacccttttccaccaggctcatgtccatggagagactgttgcacgacctctgttcttggagttcccaaaagactcttccacgtggacagtcgatcaccagatgctgtggggcgaggctctgctgattacacctgtattgcaacctggtaaggccgaagttaccgggtactttccattggggacctggtatgatctgcaaacagtcccggttgaagctcttggaagtcttccacctccacctgctgcaccaagggagcctgcgatccactctgaaggacagtgggtaactttgcctgcaccgctggacaccatcaatgtccatctgcgcgaaggctacatcataccacttcaaggtcctggactgaccactacagagtctagaaaacaaccaatggctcttgctgttgcactgactaaaagcggcgaagcaaggggtgagctgttctgggacgacggagagtcactggaggtactcgaacgaggcgcgtatacgcaggtcatttttgaggctcgcaataatacgatcgttaacgagctggtccacgtcacttcagaaggtgcaggccttcagttgggcaaggtaactgtcctgggagttgctacagcaccgcagcaggtcttgtccaacggacggcccgtaagcaactttacctatagtcctgataccaaagttctggacatctgcgttgctctgctgatgggtgagcagttcctggtatcatggtgc

SEQ ID NO: 196 - protein, 944 aa, synthetic construct
  REGION 1..944: note = Variant of the Homo Sapiens Lysosomal alpha-glucosidase
MEWSWVFLFFLSVTTGVHSGHILWHDFSTVPRELSGSSQVLEETHPAHQVGASRPGPRDAQLHPGRPRAVPTQCDVPENSRFDCAPEKAITQEQCEARGCCYIPAKQGLQGAQMGQPWCFFPPSYPSYKLENLSQSEMGYTATLTRTTPSFFPKDILTLRLDVMMETENRLHFTIKDPANRRYEVPLETPHVHSRAPSPLYSVEFSEEPFGVIVRRQLDGRVLLNTTVAPLFFADQFLQLSTSLPSQYITGLAEHLSPLMLSTSWNKITLWNRDLAPTPGANLYGSHPFYLALEDGGSAHGVFLLNSNAMDVVLQPSPALSWRSTGGILDVYIFLGPEPKSVVQQYLDVVGYPFMPPYWGLGFHLCRWGYSSTAITRQVVENMTRAHFPLDVQWNDLDYMDSRRDFTFNKDGFRDFPAMVQELHQGGRRYMMIVDPGISSSGPAGSYRPYDEGLRRGVFITNETGQPLIGKVWPGSTAFPDFTNPEALAWWEDMVAEFHDQVPFDGMWIDMNEPSNFIRGSVDGCPNNELENPPYVPGVVGGTLQAATICASSHQFLSTHYNLHNLYGTTEAIASHRALVKARGTRPFVISRSTFAGHGRYAGHWTGDVWSSWEQLASSVPEILQFNLLGVPLVGADVCGFLGNTSEELCVRWTQLGAFYPFMRNHNSLISLPQEPYSFSEPAQQAMRKALGLRYALLPHLYTLFHQAHVHGETVARPLFLEFPKDSSTWTVDHQMLWGEALLITPVLQPGKAEVTGYFPLGTWYDLQTVPVEALGSLPPPPAAPREPAIHSEGQWVTLPAPLDTINVHLREGYIIPLQGPGLTTTESRKQPMALAVALTKSGEARGELFWDDGESLEVLERGAYTQVIFEARNNTIVNELVHVTSEGAGLQLGKVTVLGVATAPQQVLSNGRPVSNFTYSPDTKVLDICVALLMGEQFLVSWC

SEQ ID NO: 197 - DNA, 2832 bp, synthetic construct
  misc_feature 1..2832: note = Variant of the Homo Sapiens Lysosomal alpha-glucosidase
  source 1..2832: mol_type = other DNA
atggaatggagctgggtctttctcttcttcctgtcagtaacgactggtgtccactccggacacattctgtggcatgatttttctaccgtgcctagagagctttccggttcaagtcaagtcctcgaagaaacacatccagcccatcaggttggcgcatctaggccgggccctcgggacgctcaactccacccagggagacctagggccgttcccactcagtgcgacgtgccagagaactcacgcttcgattgtgcacctgctaaggctatcacgcaagagcagtgcgaggcccgcggatgttgttacataccggctaaacaggggctgcagggtgcgcagatgggccaaccttggtgcttcttcccaccatcctatccgagttacaagctggagaatctctcccagtctgaaatgggatataccgcaacactgactcggaccaccccctccttctttcccaaagatatcttgactctgagacttgacgtaatgatggagacagaaaacaggctccactttaccattaaggaccctgccaatcgccgatacgaggtgcctctggaaacaccacacgtgcacagtagagctccatcacctctgtattctgtcgagttctccgaagagccgtttggcgttatcgtcaggaggcagctcgacgggcgagtgcttctgaacacgactgtggccccgttgttctttgcggatcagtttctgcaactgtcaacaagtctcccttctcagtacattaccgggcttgcagagcatctgtccccactcatgctgagtacttcatggaacaaaatcacactgtggaatagagaccttgctcctactccaggagccaacttgtatggttctcaccctttctacttggccctggaagatggcggatcagcgcatggcgtattcctcctgaattccaacgcaatggacgttgttcttcagccatctcctgctttgagttggagatctacaggcgggatactggacgtctacatctttctgggtccagagcctaaatccgtagtgcagcagtatcttgatgtcgtcggatacccgtttatgccaccatattggggcctggggttccacttgtgccgctggggatattcatccaccgccattacacgacaagttgttgagaatatgaccagggcacattttcctctggatgtacagtggaacgacctggactacatggatagtcgccgcgacttcaccttcaataaggatgggttcagagactttcctgctatggtccaagaacttcaccagggaggcaggaggtacatgatgatcgtagatccgggaatttcttcttctggcccagccggttcatacagaccgtatgacgaaggactgcgacgaggcgtctttatcacgaacgagactggtcagcctttgataggcaaggtttggccagggtccaccgctttcccggatttcacaaatcctgaggcactggcctggtgggaagatatggtcgccgagtttcacgaccaggtcccatttgacgggatgtggatcgacatgaacgagccatccaacttcattagaggaagtgtggatggctgtccgaataatgagctggaaaaccctccttacgtaccaggcgttgttggtgggactcttcaagctgcgacgatttgcgcatcctcccatcagttcctgtcaacccactataacttgcacaatctgtacgggacaacagaggctatcgccagtcatagggccctggtaaaagctagaggaacacgccctttcgttatctctcgctcaacttttgcaggccacggtaggtatgccggacattggaccggcgacgtctggagttcttgggaacagctggcttcctccgttccagagatattgcagtttaacctgttgggagtcccacttgtaggtgcagatgtttgtggcttcctggggaacacctcagaagaattgtgcgtaagatggactcaactgggcgccttctacccttttatgcgcaatcacaactcactgacatctttgcctcaagaaccgtactcatttagtgagccagcacagcaggccatgaggaaggctcttggcctgagatatgcacttctgccgcatctgtacacccttttccaccaggctcatgtccatggagagactgttgcacgacctctgttcttggagttcccaaaagactcttccacgtggacagtcgatcaccagatgctgtggggcgaggctctgctgattacacctgtattgcaacctggtaaggccgaagttaccgggtactttccattggggacctggtatgatctgcaaacagtcccggttgaagctcttggaagtcttccacctccacctgctgcaccaagggagcctgcgatccactctgaaggacagtgggtaactttgcctgcaccgctggacaccatcaatgtccatctgcgcgaaggctacatcataccacttcaaggtcctggactgaccactacagagtctagaaaacaaccaatggctcttgctgttgcactgactaaaagcggcgaagcaaggggtgagctgttctgggacgacggagagtcactggaggtactcgaacgaggcgcgtatacgcaggtcatttttgaggctcgcaataatacgatcgttaacgagctggtccacgtcacttcagaaggtgcaggccttcagttgggcaaggtaactgtcctgggagttgctacagcaccgcagcaggtcttgtccaacggacggcccgtaagcaactttacctatagtcctgataccaaagttctggacatctgcgttgctctgctgatgggtgagcagttcctggtatcatggtgc

SEQ ID NO: 198 - protein, 944 aa, synthetic construct
  REGION 1..944: note = Variant of the Homo Sapiens Lysosomal alpha-glucosidase
MEWSWVFLFFLSVTTGVHSGHILWHDFSTVPRELSGSSQVLEETHPAHQVGASRPGPRDAQLHPGRPRAVPTQCDVPENSRFDCAPAKAITQEQCEARGCCYIPAKQGLQGAQMGQPWCFFPPSYPSYKLENLSQSEMGYTATLTRTTPSFFPKDILTLRLDVMMETENRLHFTIKDPANRRYEVPLETPHVHSRAPSPLYSVEFSEEPFGVIVRRQLDGRVLLNTTVAPLFFADQFLQLSTSLPSQYITGLAEHLSPLMLSTSWNKITLWNRDLAPTPGANLYGSHPFYLALEDGGSAHGVFLLNSNAMDVVLQPSPALSWRSTGGILDVYIFLGPEPKSVVQQYLDVVGYPFMPPYWGLGFHLCRWGYSSTAITRQVVENMTRAHFPLDVQWNDLDYMDSRRDFTFNKDGFRDFPAMVQELHQGGRRYMMIVDPGISSSGPAGSYRPYDEGLRRGVFITNETGQPLIGKVWPGSTAFPDFTNPEALAWWEDMVAEFHDQVPFDGMWIDMNEPSNFIRGSVDGCPNNELENPPYVPGVVGGTLQAATICASSHQFLSTHYNLHNLYGTTEAIASHRALVKARGTRPFVISRSTFAGHGRYAGHWTGDVWSSWEQLASSVPEILQFNLLGVPLVGADVCGFLGNTSEELCVRWTQLGAFYPFMRNHNSLTSLPQEPYSFSEPAQQAMRKALGLRYALLPHLYTLFHQAHVHGETVARPLFLEFPKDSSTWTVDHQMLWGEALLITPVLQPGKAEVTGYFPLGTWYDLQTVPVEALGSLPPPPAAPREPAIHSEGQWVTLPAPLDTINVHLREGYIIPLQGPGLTTTESRKQPMALAVALTKSGEARGELFWDDGESLEVLERGAYTQVIFEARNNTIVNELVHVTSEGAGLQLGKVTVLGVATAPQQVLSNGRPVSNFTYSPDTKVLDICVALLMGEQFLVSWC

SEQ ID NO: 199 - DNA, 2832 bp, synthetic construct
  misc_feature 1..2832: note = Variant of the Homo Sapiens Lysosomal alpha-glucosidase
  source 1..2832: mol_type = other DNA
atggaatggagctgggtctttctcttcttcctgtcagtaacgactggtgtccactccggacacattctgtggcatgatttttctaccgtgcctagagagctttccggttcaagtcaagtcctcgaagaaacacatccagcccatcaggttggcgcatctaggccgggccctcgggacgctcaactccacccagggagacctagggccgttcccactcagtgcgacgtgccagagaactcacgcttcgattgtgcacctgagaaggctatcacgcaagagcagtgcgaggcccgcggatgttgttacataccggctaaacaggggctgcagggtgcgcagatgggccaaccttggtgcttcttcccaccatcctatccgagttacaagctggagaatctctcccagtctgaaatgggatataccgcaacactgactcggaccaccccctccttctttcccaaagatatcttgactctgagacttgacgtaatgatggagacagaaaacaggctccactttaccattaaggaccctgccaatcgccgatacgaggtgcctctggaaacaccacacgtgcacagtagagctccatcacctctgtattctgtcgagttctccgaagagccgtttggcgttatcgtcaggaggcagctcgacgggcgagtgcttctgaacacgactgtggccccgttgttctttgcggatcagtttctgcaactgtcaacaagtctcccttctcagtacattaccgggcttgcagagcatctgtccccactcatgctgagtacttcatggaacaaaatcacactgtggaatagagaccttgctcctactccaggagccaacttgtatggttctcaccctttctacttggccctggaagatggcggatcagcgcatggcgtattcctcctgaattccaacgcaatggacgttgttcttcagccatctcctgctttgagttggagatctacaggcgggatactggacgtctacatctttctgggtccagagcctaaatccgtagtgcagcagtatcttgatgtcgtcggatacccgtttatgccaccatattggggcctggggttccacttgtgccgctggggatattcatccaccgccattacacgacaagttgttgagaatatgaccagggcacattttcctctggatgtacagtggaacgacctggactacatggatagtcgccgcgacttcaccttcaataaggatgggttcagagactttcctgctatggtccaagaacttcaccagggaggcaggaggtacatgatgatcgtagatccgggaatttcttcttctggcccagccggttcatacagaccgtatgacgaaggactgcgacgaggcgtctttatcacgaacgagactggtcagcctttgataggcaaggtttggccagggtccaccgctttcccggatttcacaaatcctgaggcactggcctggtgggaagatatggtcgccgagtttcacgaccaggtcccatttgacgggatgtggatcgacatgaacgagccatccaacttcattagaggaagtgtggatggctgtccgaataatgagctggaaaaccctccttacgtaccaggcgttgttggtgggactcttcaagctgcgacgatttgcgcatcctcccatcagttcctgtcaacccactataacttgcacaatctgtacgggacaacagaggctatcgccagtcatagggccctggtaaaagctagaggaacacgccctttcgttatctctcgctcaacttttgcaggccacggtaggtatgccggacattggaccggcgacgtctggagttcttgggaacagctggcttcctccgttccagagatattgcagtttaacctgttgggagtcccacttgtaggtgcagatgtttgtggcttcctggggaacacctcagaagaattgtgcgtaagatggactcaactgggcgccttctacccttttatgcgcaatcacaactcactgacatctttgcctcaagaaccgtactcatttagtgagccagcacagcaggccatgaggaaggctcttggcctgagatatgcacttctgccgcatctgtacacccttttccaccaggctcatgtccatggagagactgttgcacgacctctgttcttggagttcccaaaagactcttccacgtggacagtcgatcaccagatgctgtggggcgaggctctgctgattacacctgtattgcaacctggtaaggccgaagttaccgggtactttccattggggacctggtatgatctgcaaacagtcccggttgaagctcttggaagtcttccacctccacctgctgcaccaagggagcctgcgatccactctgaaggacagtgggtaactttgcctgcaccgctggacaccatcaatgtccatctgcgcgaaggctacatcataccacttcaaggtcctggactgaccactacagagtctagaaaacaaccaatggctcttgctgttgcactgactaaaagcggcgaagcaaggggtgagctgttctgggacgacggagagtcactggaggtactcgaacgaggcgcgtatacgcaggtcatttttgaggctcgcaataatacgatcgttaacgagctggtccacgtcacttcagaaggtgcaggccttcagttggctaaggtaactgtcctgggagttgctacagcaccgcagcaggtcttgtccaacggacggcccgtaagcaactttacctatagtcctgataccaaagttctggacatctgcgttgctctgctgatgggtgagcagttcctggtatcatggtgc

SEQ ID NO: 200 - protein, 944 aa, synthetic construct
  REGION 1..944: note = Variant of the Homo Sapiens Lysosomal alpha-glucosidase
MEWSWVFLFFLSVTTGVHSGHILWHDFSTVPRELSGSSQVLEETHPAHQVGASRPGPRDAQLHPGRPRAVPTQCDVPENSRFDCAPEKAITQEQCEARGCCYIPAKQGLQGAQMGQPWCFFPPSYPSYKLENLSQSEMGYTATLTRTTPSFFPKDILTLRLDVMMETENRLHFTIKDPANRRYEVPLETPHVHSRAPSPLYSVEFSEEPFGVIVRRQLDGRVLLNTTVAPLFFADQFLQLSTSLPSQYITGLAEHLSPLMLSTSWNKITLWNRDLAPTPGANLYGSHPFYLALEDGGSAHGVFLLNSNAMDVVLQPSPALSWRSTGGILDVYIFLGPEPKSVVQQYLDVVGYPFMPPYWGLGFHLCRWGYSSTAITRQVVENMTRAHFPLDVQWNDLDYMDSRRDFTFNKDGFRDFPAMVQELHQGGRRYMMIVDPGISSSGPAGSYRPYDEGLRRGVFITNETGQPLIGKVWPGSTAFPDFTNPEALAWWEDMVAEFHDQVPFDGMWIDMNEPSNFIRGSVDGCPNNELENPPYVPGVVGGTLQAATICASSHQFLSTHYNLHNLYGTTEAIASHRALVKARGTRPFVISRSTFAGHGRYAGHWTGDVWSSWEQLASSVPEILQFNLLGVPLVGADVCGFLGNTSEELCVRWTQLGAFYPFMRNHNSLTSLPQEPYSFSEPAQQAMRKALGLRYALLPHLYTLFHQAHVHGETVARPLFLEFPKDSSTWTVDHQMLWGEALLITPVLQPGKAEVTGYFPLGTWYDLQTVPVEALGSLPPPPAAPREPAIHSEGQWVTLPAPLDTINVHLREGYIIPLQGPGLTTTESRKQPMALAVALTKSGEARGELFWDDGESLEVLERGAYTQVIFEARNNTIVNELVHVTSEGAGLQLAKVTVLGVATAPQQVLSNGRPVSNFTYSPDTKVLDICVALLMGEQFLVSWC

SEQ ID NO: 201 - DNA, 2832 bp, synthetic construct
  misc_feature 1..2832: note = Variant of the Homo Sapiens Lysosomal alpha-glucosidase
  source 1..2832: mol_type = other DNA
atggaatggagctgggtctttctcttcttcctgtcagtaacgactggtgtccactccggacacattctgtggcatgatttttctaccgtgcctagagagctttccggttcaagtcaagtcctcgaagaaacacatccagcccatcaggttggcgcatctaggccgggccctcgggacgctcaactccacccagggagacctagggccgttcccactcagtgcgacgtgccagagaactcacgcttcgattgtgcacctgagaaggctatcacgcaagagcagtgcgaggcccgcggatgttgttacataccggctaaacaggggctgcagggtgcgcagatgggccaaccttggtgcttcttcccaccatcctatccgagttacaagctggagaatctctcccagtctgaaatgggatataccgcaacactgactcggaccaccccctccttctttcccaaagatatcttgactctgagacttgacgtaatgatggagacagaaaacaggctccactttaccattaaggaccctgccaatcgccgatacgaggtgcctctggaaacaccacacgtgcacagtagagctccatcacctctgtattctgtcgagttctccgaagagccgtttggcgttatcgtcaggaggcagctcgacgggcgagtgcttctgaacacgactgtggccccgttgttctttgcggatcagtttctgcaactgtcaacaagtctcccttctcagtacattaccgggcttgcagagcatctgtccccactcatgctgagtacttcatgggcgaaaatcacactgtggaatagagaccttgctcctactccaggagccaacttgtatggttctcaccctttctacttggccctggaagatggcggatcagcgcatggcgtattcctcctgaattccaacgcaatggacgttgttcttcagccatctcctgctttgagttggagatctacaggcgggatactggacgtctacatctttctgggtccagagcctaaatccgtagtgcagcagtatcttgatgtcgtcggatacccgtttatgccaccatattggggcctggggttccacttgtgccgctggggatattcatccaccgccattacacgacaagttgttgagaatatgaccagggcacattttcctctggatgtacagtggaacgacctggactacatggatagtcgccgcgacttcaccttcaataaggatgggttcagagactttcctgctatggtccaagaacttcaccagggaggcaggaggtacatgatgatcgtagatccgggaatttcttcttctggcccagccggttcatacagaccgtatgacgaaggactgcgacgaggcgtctttatcacgaacgagactggtcagcctttgataggcaaggtttggccagggtccaccgctttcccggatttcacaaatcctgaggcactggcctggtgggaagatatggtcgccgagtttcacgaccaggtcccatttgacgggatgtggatcgacatgaacgagccatccaacttcattagaggaagtgtggatggctgtccgaataatgagctggaaaaccctccttacgtaccaggcgttgttggtgggactcttcaagctgcgacgatttgcgcatcctcccatcagttcctgtcaacccactataacttgcacaatctgtacgggacaacagaggctatcgccagtcatagggccctggtaaaagctagaggaacacgccctttcgttatctctcgctcaacttttgcaggccacggtaggtatgccggacattggaccggcgacgtctggagttcttgggaacagctggcttcctccgttccagagatattgcagtttaacctgttgggagtcccacttgtaggtgcagatgtttgtggcttcctggggaacacctcagaagaattgtgcgtaagatggactcaactgggcgccttctacccttttatgcgcaatcacaactcactgacatctttgcctcaagaaccgtactcatttagtgagccagcacagcaggccatgaggaaggctcttggcctgagatatgcacttctgccgcatctgtacacccttttccaccaggctcatgtccatggagagactgttgcacgacctctgttcttggagttcccaaaagactcttccacgtggacagtcgatcaccagatgctgtggggcgaggctctgctgattacacctgtattgcaacctggtaaggccgaagttaccgggtactttccattggggacctggtatgatctgcaaacagtcccggttgaagctcttggaagtcttccacctccacctgctgcaccaagggagcctgcgatccactctgaaggacagtgggtaactttgcctgcaccgctggacaccatcaatgtccatctgcgcgaaggctacatcataccacttcaaggtcctggactgaccactacagagtctagaaaacaaccaatggctcttgctgttgcactgactaaaagcggcgaagcaaggggtgagctgttctgggacgacggagagtcactggaggtactcgaacgaggcgcgtatacgcaggtcatttttgaggctcgcaataatacgatcgttaacgagctggtccacgtcacttcagaaggtgcaggccttcagttgggcaaggtaactgtcctgggagttgctacagcaccgcagcaggtcttgtccaacggacggcccgtaagcaactttacctatagtcctgataccaaagttctggacatctgcgttgctctgctgatgggtgagcagttcctggtatcatggtgc

SEQ ID NO: 202 - protein, 944 aa, synthetic construct
  REGION 1..944: note = Variant of the Homo Sapiens Lysosomal alpha-glucosidase
MEWSWVFLFFLSVTTGVHSGHILWHDFSTVPRELSGSSQVLEETHPAHQVGASRPGPRDAQLHPGRPRAVPTQCDVPENSRFDCAPEKAITQEQCEARGCCYIPAKQGLQGAQMGQPWCFFPPSYPSYKLENLSQSEMGYTATLTRTTPSFFPKDILTLRLDVMMETENRLHFTIKDPANRRYEVPLETPHVHSRAPSPLYSVEFSEEPFGVIVRRQLDGRVLLNTTVAPLFFADQFLQLSTSLPSQYITGLAEHLSPLMLSTSWAKITLWNRDLAPTPGANLYGSHPFYLALEDGGSAHGVFLLNSNAMDVVLQPSPALSWRSTGGILDVYIFLGPEPKSVVQQYLDVVGYPFMPPYWGLGFHLCRWGYSSTAITRQVVENMTRAHFPLDVQWNDLDYMDSRRDFTFNKDGFRDFPAMVQELHQGGRRYMMIVDPGISSSGPAGSYRPYDEGLRRGVFITNETGQPLIGKVWPGSTAFPDFTNPEALAWWEDMVAEFHDQVPFDGMWIDMNEPSNFIRGSVDGCPNNELENPPYVPGVVGGTLQAATICASSHQFLSTHYNLHNLYGTTEAIASHRALVKARGTRPFVISRSTFAGHGRYAGHWTGDVWSSWEQLASSVPEILQFNLLGVPLVGADVCGFLGNTSEELCVRWTQLGAFYPFMRNHNSLTSLPQEPYSFSEPAQQAMRKALGLRYALLPHLYTLFHQAHVHGETVARPLFLEFPKDSSTWTVDHQMLWGEALLITPVLQPGKAEVTGYFPLGTWYDLQTVPVEALGSLPPPPAAPREPAIHSEGQWVTLPAPLDTINVHLREGYIIPLQGPGLTTTESRKQPMALAVALTKSGEARGELFWDDGESLEVLERGAYTQVIFEARNNTIVNELVHVTSEGAGLQLGKVTVLGVATAPQQVLSNGRPVSNFTYSPDTKVLDICVALLMGEQFLVSWC

SEQ ID NO: 203 - DNA, 2832 bp, synthetic construct
  misc_feature 1..2832: note = Variant of the Homo Sapiens Lysosomal alpha-glucosidase
  source 1..2832: mol_type = other DNA
atggaatggagctgggtctttctcttcttcctgtcagtaacgactggtgtccactccggacacattctgtggcatgatttttctaccgtgcctagagagctttccggttcaagtcaagtcctcgaagaaacacatccagcccatcaggttggcgcatctaggccgggccctcgggacgctcaactccacccagggagacctagggccgttcccactcagtgcgacgtgccagagaactcacgcttcgattgtgcacctgagaaggctatcacgcaagagcagtgcgaggcccgcggatgttgttacataccggctaaacaggggctgcagggtgcgcagatgggccaaccttggtgcttcttcccaccatcctatccgagttacaagctggagaatctctcccagtctgaaatgggatataccgcaacactgactcggaccaccccctccttctttcccaaagatatcttgactctgagacttgacgtaatgatggagacagaaaacaggctccactttaccattaaggaccctgccaatcgccgatacgaggtgcctctggaaacaccacacgtgcacagtagagctccatcacctctgtattctgtcgagttctccgaagagccgtttggcgttatcgtcaggaggcagctcgacgggcgagtgcttctgaacacgactgtggccccgttgttctttgcggatcagtttctgcaactgtcaacaagtctcccttctcagtacattaccgggcttgcagagcatctgtccccactcatgctgagtacttcatggaacaaaatcacactgtggaatagagaccttgctcctactccaggagccaacttgtatggttctcaccctttctacttggccctggaagatggcggatcagcgcatggcgtattcctcctgaattccaacgcaatggacgttgttcttcagccatctcctgctttgagttggagatctacaggcgggatactggacgtctacatctttctgggtccagagcctaaatccgtagtgcagcagtatcttgatgtcgtcggatacccgtttatgccaccatattggggcctggggttccacttgtgccgctggggatattcatccaccgccattacacgacaagttgttgagaatatgaccagggcacattttcctctggatgtacagtggaacgacctggactacatggatagtcgccgcgacttcaccttcaataaggatgggttcagagactttcctgctatggtccaagaacttcaccagggaggcaggaggtacatgatgatcgtagatccgggaatttcttcttctggcccagccggttcatacagaccgtatgacgaaggactgcgacgaggcgtctttatcacgaacgagactggtcagcctttgataggcaaggtttggccagggtccaccgctttcccggatttcacaaatcctgaggcactggcctggtgggaagatatggtcgccgagtttcacgaccaggtcccatttgacgggatgtggatcgacatgaacgagccatccaacttcattagaggaagtgaggatggctgtccgaataatgagctggaaaaccctccttacgtaccaggcgttgttggtgggactcttcaagctgcgacgatttgcgcatcctcccatcagttcctgtcaacccactataacttgcacaatctgtacgggacaacagaggctatcgccagtcatagggccctggtaaaagctagaggaacacgccctttcgttatctctcgctcaacttttgcaggccacggtaggtatgccggacattggaccggcgacgtctggagttcttgggaacagctggcttcctccgttccagagatattgcagtttaacctgttgggagtcccacttgtaggtgcagatgtttgtggcttcctggggaacacctcagaagaattgtgcgtaagatggactcaactgggcgccttctacccttttatgcgcaatcacaactcactgacatctttgcctcaagaaccgtactcatttagtgagccagcacagcaggccatgaggaaggctcttggcctgagatatgcacttctgccgcatctgtacacccttttccaccaggctcatgtccatggagagactgttgcacgacctctgttcttggagttcccaaaagactcttccacgtggacagtcgatcaccagatgctgtggggcgaggctctgctgattacacctgtattgcaacctggtaaggccgaagttaccgggtactttccattggggacctggtatgatctgcaaacagtcccggttgaagctcttggaagtcttccacctccacctgctgcaccaagggagcctgcgatccactctgaaggacagtgggtaactttgcctgcaccgctggacaccatcaatgtccatctgcgcgaaggctacatcataccacttcaaggtcctggactgaccactacagagtctagaaaacaaccaatggctcttgctgttgcactgactaaaagcggcgaagcaaggggtgagctgttctgggacgacggagagtcactggaggtactcgaacgaggcgcgtatacgcaggtcatttttgaggctcgcaataatacgatcgttaacgagctggtccacgtcacttcagaaggtgcaggccttcagttgggcaaggtaactgtcctgggagttgctacagcaccgcagcaggtcttgtccaacggacggcccgtaagcaactttacctatagtcctgataccaaagttctggacatctgcgttgctctgctgatgggtgagcagttcctggtatcatggtgc

SEQ ID NO: 204 - protein, 944 aa, synthetic construct
  REGION 1..944: note = Variant of the Homo Sapiens Lysosomal alpha-glucosidase
MEWSWVFLFFLSVTTGVHSGHILWHDFSTVPRELSGSSQVLEETHPAHQVGASRPGPRDAQLHPGRPRAVPTQCDVPENSRFDCAPEKAITQEQCEARGCCYIPAKQGLQGAQMGQPWCFFPPSYPSYKLENLSQSEMGYTATLTRTTPSFFPKDILTLRLDVMMETENRLHFTIKDPANRRYEVPLETPHVHSRAPSPLYSVEFSEEPFGVIVRRQLDGRVLLNTTVAPLFFADQFLQLSTSLPSQYITGLAEHLSPLMLSTSWNKITLWNRDLAPTPGANLYGSHPFYLALEDGGSAHGVFLLNSNAMDVVLQPSPALSWRSTGGILDVYIFLGPEPKSVVQQYLDVVGYPFMPPYWGLGFHLCRWGYSSTAITRQVVENMTRAHFPLDVQWNDLDYMDSRRDFTFNKDGFRDFPAMVQELHQGGRRYMMIVDPGISSSGPAGSYRPYDEGLRRGVFITNETGQPLIGKVWPGSTAFPDFTNPEALAWWEDMVAEFHDQVPFDGMWIDMNEPSNFIRGSEDGCPNNELENPPYVPGVVGGTLQAATICASSHQFLSTHYNLHNLYGTTEAIASHRALVKARGTRPFVISRSTFAGHGRYAGHWTGDVWSSWEQLASSVPEILQFNLLGVPLVGADVCGFLGNTSEELCVRWTQLGAFYPFMRNHNSLTSLPQEPYSFSEPAQQAMRKALGLRYALLPHLYTLFHQAHVHGETVARPLFLEFPKDSSTWTVDHQMLWGEALLITPVLQPGKAEVTGYFPLGTWYDLQTVPVEALGSLPPPPAAPREPAIHSEGQWVTLPAPLDTINVHLREGYIIPLQGPGLTTTESRKQPMALAVALTKSGEARGELFWDDGESLEVLERGAYTQVIFEARNNTIVNELVHVTSEGAGLQLGKVTVLGVATAPQQVLSNGRPVSNFTYSPDTKVLDICVALLMGEQFLVSWC

SEQ ID NO: 205 - DNA, 2832 bp, synthetic construct
  misc_feature 1..2832: note = Variant of the Homo Sapiens Lysosomal alpha-glucosidase
  source 1..2832: mol_type = other DNA
atggaatggagctgggtctttctcttcttcctgtcagtaacgactggtgtccactccggacacattctgtggcatgattttcggaccgtgcctagagagctttccggttcaagtcaagtcctcgaagaaacacatccagcccatcaggttggcgcatctaggccgggccctcgggacgctcaactccacccagggagacctagggccgttcccactcagtgcgacgtgccagagaactcacgcttcgattgtgcacctgagaaggctatcacgcaagagcagtgcgaggcccgcggatgttgttacataccggctaaacaggggctgcagggtgcgcagatgggccaaccttggtgcttcttcccaccatcctatccgagttacaagctggagaatctctcccagtctgaaatgggatataccgcaacactgactcggaccaccccctccttctttcccaaagatatcttgactctgagacttgacgtaatgatggagacagaaaacaggctccactttaccattaaggaccctgccaatcgccgatacgaggtgcctctggaaacaccacacgtgcacagtagagctccatcacctctgtattctgtcgagttctccgaagagccgtttggcgttatcgtcaggaggcagctcgacgggcgagtgcttctgaacacgactgtggccccgttgttctttgcggatcagtttctgcaactgtcaacaagtctcccttctcagtacattaccgggcttgcagagcatctgtccccactcatgctgagtacttcatggaacaaaatcacactgtggaatagagaccttgctcctactccaggagccaacttgtatggttctcaccctttctacttggccctggaagatggcggatcagcgcatggcgtattcctcctgaattccaacgcaatggacgttgttcttcagccatctcctgctttgagttggagatctacaggcgggatactggacgtctacatctttctgggtccagagcctaaatccgtagtgcagcagtatcttgatgtcgtcggatacccgtttatgccaccatattggggcctggggttccacttgtgccgctggggatattcatccaccgccattacacgacaagttgttgagaatatgaccagggcacattttcctctggatgtacagtggaacgacctggactacatggatagtcgccgcgacttcaccttcaataaggatgggttcagagactttcctgctatggtccaagaacttcaccagggaggcaggaggtacatgatgatcgtagatccgggaatttcttcttctggcccagccggttcatacagaccgtatgacgaaggactgcgacgaggcgtctttatcacgaacgagactggtcagcctttgataggcaaggtttggccagggtccaccgctttcccggatttcacaaatcctgaggcactggcctggtgggaagatatggtcgccgagtttcacgaccaggtcccatttgacgggatgtggatcgacatgaacgagccatccaacttcattagaggaagtgtggatggctgtccgaataatgagctggaaaaccctccttacgtaccaggcgttgttggtgggactcttcaagctgcgacgatttgcgcatcctcccatcagttcctgtcaacccactataacttgcacaatctgtacgggacaacagaggctatcgccagtcatagggccctggtaaaagctagaggaacacgccctttcgttatctctcgctcaacttttgcaggccacggtaggtatgccggacattggaccggcgacgtctggagttcttgggaacagctggcttcctccgttccagagatattgcagtttaacctgttgggagtcccacttgtaggtgcagatgtttgtggcttcctggggaacacctcagaagaattgtgcgtaagatggactcaactgggcgccttctacccttttatgcgcaatcacaactcactgacatctttgcctcaagaaccgtactcatttagtgagccagcacagcaggccatgaggaaggctcttggcctgagatatgcacttctgccgcatctgtacacccttttccaccaggctcatgtccatggagagactgttgcacgacctctgttcttggagttcccaaaagactcttccacgtggacagtcgatcaccagatgctgtggggcgaggctctgctgattacacctgtattgcaacctggtaaggccgaagttaccgggtactttccattggggacctggtatgatctgcaaacagtcccggttgaagctcttggaagtcttccacctccacctgctgcaccaagggagcctgcgatccactctgaaggacagtgggtaactttgcctgcaccgctggacaccatcaatgtccatctgcgcgaaggctacatcataccacttcaaggtcctggactgaccactacagagtctagaaaacaaccaatggctcttgctgttgcactgactaaaagcggcgaagcaaggggtgagctgttctgggacgacggagagtcactggaggtactcgaacgaggcgcgtatacgcaggtcatttttgaggctcgcaataatacgatcgttaacgagctggtccacgtcacttcagaaggtgcaggccttcagttgggcaaggtaactgtcctgggagttgctacagcaccgcagcaggtcttgtccaacggacggcccgtaagcaactttacctatagtcctgataccaaagttctggacatctgcgttgctctgctgatgggtgagcagttcctggtatcatggtgc

SEQ ID NO: 206 - protein, 944 aa, synthetic construct
  REGION 1..944: note = Variant of the Homo Sapiens Lysosomal alpha-glucosidase
MEWSWVFLFFLSVTTGVHSGHILWHDFRTVPRELSGSSQVLEETHPAHQVGASRPGPRDAQLHPGRPRAVPTQCDVPENSRFDCAPEKAITQEQCEARGCCYIPAKQGLQGAQMGQPWCFFPPSYPSYKLENLSQSEMGYTATLTRTTPSFFPKDILTLRLDVMMETENRLHFTIKDPANRRYEVPLETPHVHSRAPSPLYSVEFSEEPFGVIVRRQLDGRVLLNTTVAPLFFADQFLQLSTSLPSQYITGLAEHLSPLMLSTSWNKITLWNRDLAPTPGANLYGSHPFYLALEDGGSAHGVFLLNSNAMDVVLQPSPALSWRSTGGILDVYIFLGPEPKSVVQQYLDVVGYPFMPPYWGLGFHLCRWGYSSTAITRQVVENMTRAHFPLDVQWNDLDYMDSRRDFTFNKDGFRDFPAMVQELHQGGRRYMMIVDPGISSSGPAGSYRPYDEGLRRGVFITNETGQPLIGKVWPGSTAFPDFTNPEALAWWEDMVAEFHDQVPFDGMWIDMNEPSNFIRGSVDGCPNNELENPPYVPGVVGGTLQAATICASSHQFLSTHYNLHNLYGTTEAIASHRALVKARGTRPFVISRSTFAGHGRYAGHWTGDVWSSWEQLASSVPEILQFNLLGVPLVGADVCGFLGNTSEELCVRWTQLGAFYPFMRNHNSLTSLPQEPYSFSEPAQQAMRKALGLRYALLPHLYTLFHQAHVHGETVARPLFLEFPKDSSTWTVDHQMLWGEALLITPVLQPGKAEVTGYFPLGTWYDLQTVPVEALGSLPPPPAAPREPAIHSEGQWVTLPAPLDTINVHLREGYIIPLQGPGLTTTESRKQPMALAVALTKSGEARGELFWDDGESLEVLERGAYTQVIFEARNNTIVNELVHVTSEGAGLQLGKVTVLGVATAPQQVLSNGRPVSNFTYSPDTKVLDICVALLMGEQFLVSWC

SEQ ID NO: 207 - DNA, 2832 bp, synthetic construct
  misc_feature 1..2832: note = Variant of the Homo Sapiens Lysosomal alpha-glucosidase
  source 1..2832: mol_type = other DNA
atggaatggagctgggtctttctcttcttcctgtcagtaacgactggtgtccactccggacacattctgtggcatgatttttctaccgtgcctagagagctttccggttcaagtcaagtcctcgaagaaacacatccagcccatcaggttggcgcatctaggccgggccctcgggacgctcaactccacccagggagacctagggccgttcccactcagtgcgacgtgccagagaactcacgcttcgattgtgcacctgagaaggctatcacgcaagagcagtgcgaggcccgcggatgttgttacataccggctaaacaggggctgcagggtgcgcagatgggccaaccttggtgcttcttcccaccatcctatccgagttacaagctggagaatctctcccagtctgaaatgggatataccgcaacactgactcggaccaccccctccttctttcccaaagatatcttgactctgagacttgacgtaatgatggagacagaaaacaggctccactttaccattaaggaccctgccaatcgccgatacgaggtgcctctggaaacaccacacgtgcacagtagagctccatcacctctgtattctgtcgagttctccgaagagccgtttggcgttatcgtcaggaggcagctcgacgggcgagtgcttctgaacacgactgtggccccgttgttctttgcggatcagtttctgcaactgtcaacaagtctcccttctcagtacattaccgggcttgcagagcatctgtccccactcatgctgagtacttcatggaacaaaatcacactgtggaatagagaccttgctcctactccaggagccaacttgtatggttctcaccctttctacttggccctggaagatggcggatcagcgcatggcgtattcctcctgaattccaacgcaatggacgttgttcttcagccatctcctgctttgagttggagatctacaggcgggatactggacgtctacatctttctgggtccagagcctaaatccgtagtgcagcagtatcttgatgtcgtcggatacccgtttatgccaccatattggggcctggggttccacttgtgccgctggggatattcatccaccgccattacacgacaagttgttgagaatatgaccagggcacattttcctctggatgtacagtggaacgacctggactacatggatagtcgccgcgacttcaccttcaataaggatgggttcagagactttcctgctatggtccaagaacttcaccagggaggcaggaggtacatgatgatcgtagatccgggaatttcttcttctggcccagccggttcatacagaccgtatgacgaaggactgcgacgaggcgtctttatcacgaacgagactggtcagcctttgataggcaaggtttggccagggtccaccgctttcccggatttcacaaatcctgaggcactggcctggtgggaagatatggtcgccgagtttcacgaccaggtcccatttgacgggatgtggatcgacatgaacgagccatccaacttcattagaggaagtgtggatggctgtccgaataatgagctggaaaaccctccttacgtaccaggcgttgttggtgggactcttcaagctgcgacgatttgcgcatcctcccatcagttcctgtcaacccactataacttgcacaatctgtacgggacaacagaggctatcgccagtcatagggccctggtaaaagctagaggaacacgccctttcgttatctctcgctcaacttttgcaggccacggtaggtatgccggacattggaccggcgacgtctggagttcttgggaacagctggcttcctccgttccagagatattgcagtttaacctgttgggagtcccacttgtaggtgcagatgtttgtggcttcctggggaacacctcagaagaattgtgcgtaagatggactcaactgggcgccttctacccttttatgcgcaatcacaactcactgacatctttgcctcaagaaccgtactcatttagtgagccagcacagcaggccatgaggaaggctcttggcctgagatatgcacttctgccgcatctgtacacccttttccaccaggctcatgtccatggagagactgttgcacgacctctgttcttggagttcccaaaagactcttccacgtggacagtcgatcaccagatgctgtggggcgaggctctgctgattacacctgtattgcaacctggtaaggccgaagttaccgggtactttccattggggacctggtatgatctgcaaacagtcccggttgaagctcttggaagtcttccacctccacctgctgcaccaagggagcctgcgatccactctgaaggacagtgggtaactttgcctgcaccgctggacaccatcaatgtccatctgcgcgaaggctacatcataccacttcaaggtcctggactgaccactacagagtctagaaaacaaccaatggctcttgctgttgcactgactaaaagcggcgaagcaaggggtgagctgttctgggacgacggagagtcactggaggtactcgaacgaggcgcgtatacgcaggtcatttttggggctcgcaataatacgatcgttaacgagctggtccacgtcacttcagaaggtgcaggccttcagttgggcaaggtaactgtcctgggagttgctacagcaccgcagcaggtcttgtccaacggacggcccgtaagcaactttacctatagtcctgataccaaagttctggacatctgcgttgctctgctgatgggtgagcagttcctggtatcatggtgc

SEQ ID NO: 208 - protein, 944 aa, synthetic construct
  REGION 1..944: note = Variant of the Homo Sapiens Lysosomal alpha-glucosidase
MEWSWVFLFFLSVTTGVHSGHILWHDFSTVPRELSGSSQVLEETHPAHQVGASRPGPRDAQLHPGRPRAVPTQCDVPENSRFDCAPEKAITQEQCEARGCCYIPAKQGLQGAQMGQPWCFFPPSYPSYKLENLSQSEMGYTATLTRTTPSFFPKDILTLRLDVMMETENRLHFTIKDPANRRYEVPLETPHVHSRAPSPLYSVEFSEEPFGVIVRRQLDGRVLLNTTVAPLFFADQFLQLSTSLPSQYITGLAEHLSPLMLSTSWNKITLWNRDLAPTPGANLYGSHPFYLALEDGGSAHGVFLLNSNAMDVVLQPSPALSWRSTGGILDVYIFLGPEPKSVVQQYLDVVGYPFMPPYWGLGFHLCRWGYSSTAITRQVVENMTRAHFPLDVQWNDLDYMDSRRDFTFNKDGFRDFPAMVQELHQGGRRYMMIVDPGISSSGPAGSYRPYDEGLRRGVFITNETGQPLIGKVWPGSTAFPDFTNPEALAWWEDMVAEFHDQVPFDGMWIDMNEPSNFIRGSVDGCPNNELENPPYVPGVVGGTLQAATICASSHQFLSTHYNLHNLYGTTEAIASHRALVKARGTRPFVISRSTFAGHGRYAGHWTGDVWSSWEQLASSVPEILQFNLLGVPLVGADVCGFLGNTSEELCVRWTQLGAFYPFMRNHNSLTSLPQEPYSFSEPAQQAMRKALGLRYALLPHLYTLFHQAHVHGETVARPLFLEFPKDSSTWTVDHQMLWGEALLITPVLQPGKAEVTGYFPLGTWYDLQTVPVEALGSLPPPPAAPREPAIHSEGQWVTLPAPLDTINVHLREGYIIPLQGPGLTTTESRKQPMALAVALTKSGEARGELFWDDGESLEVLERGAYTQVIFGARNNTIVNELVHVTSEGAGLQLGKVTVLGVATAPQQVLSNGRPVSNFTYSPDTKVLDICVALLMGEQFLVSWC

SEQ ID NO: 209 - DNA, 2832 bp, synthetic construct
  misc_feature 1..2832: note = Variant of the Homo Sapiens Lysosomal alpha-glucosidase
  source 1..2832: mol_type = other DNA
atggaatggagctgggtctttctcttcttcctgtcagtaacgactggtgtccactccggacacattctgtggcatgatttttctaccgtgcctagagagctttccggttcaagtcaagtcctcgaagaaacacatccagcccatcaggttggcgcatctaggccgggccctcgggacgctcaactccacccagggagacctagggccgttcccactcagtgcgacgtgccagagaactcacgcttcgattgtgcacctgagaaggctatcacgcaagagcagtgcgaggcccgcggatgttgttacataccggctaaacaggggctgcagggtgcgcagatgggccaaccttggtgcttcttcccaccatcctatccgagttacaagctggagaatctctcccagtctgaaatgggatataccgcaacactgactcggaccaccccctccttctttcccaaagatatcttgactctgagacttgacgtaatgatggagacagaaaacaggctccactttaccattaaggaccctgccaatcgccgatacgaggtgcctctggaaacaccacacgtgcacagtagagctccatcacctctgtattctgtcgagttctccgaagagccgtttggcgttatcgtcaggaggcagctcgacgggcgagtgcttctgaacacgactgtggccccgttgttctttgcggatcagtttctgcaactgtcaacaagtctcccttctcagtacattaccgggcttgcagagcatctgtccccactcatgctgagtacttcatggaacaaaatcacactgtggaatagagaccttgctcctactccaggagccaacttgtatggttctcaccctttctacttggccctggaagatggcggatcagcgcatggcgtattcctcctgaattccaacgcaatggacgttgttcttcagccatctcctgctttgagttggagatctacaggcgggatactggacgtctacatctttctgggtccagagcctaaatccgtagtgcagcagtatcttgatgtcgtcggatacccgtttatgccaccatattggggcctggggttccacttgtgccgctggggatattcatccaccgccattacacgacaagttgttgagaatatgaccagggcacattttcctctggatgtacagtggaacgacctggactacatggatagtcgccgcgacttcaccttcaataaggatgggttcagagactttcctgctatggtccaagaacttcaccagggaggcaggaggtacatgatgatcgtagatccgggaatttcttcttctggcccagccggttcatacagaccgtatgacgaaggactgcgacgaggcgtctttatcacgaacgagactggtcagcctttgataggcaaggtttggccagggtccaccgctttcccggatttcacaaatcctgaggcactggcctggtgggaagatatggtcgccgagtttcacgaccaggtcccatttgacgggatgtggatcgacatgaacgagccatccaacttcattagaggaagtattgatggctgtccgaataatgagctggaaaaccctccttacgtaccaggcgttgttggtgggactcttcaagctgcgacgatttgcgcatcctcccatcagttcctgtcaacccactataacttgcacaatctgtacgggacaacagaggctatcgccagtcatagggccctggtaaaagctagaggaacacgccctttcgttatctctcgctcaacttttgcaggccacggtaggtatgccggacattggaccggcgacgtctggagttcttgggaacagctggcttcctccgttccagagatattgcagtttaacctgttgggagtcccacttgtaggtgcagatgtttgtggcttcctggggaacacctcagaagaattgtgcgtaagatggactcaactgggcgccttctacccttttatgcgcaatcacaactcactgacatctttgcctcaagaaccgtactcatttagtgagccagcacagcaggccatgaggaaggctcttggcctgagatatgcacttctgccgcatctgtacacccttttccaccaggctcatgtccatggagagactgttgcacgacctctgttcttggagttcccaaaagactcttccacgtggacagtcgatcaccagatgctgtggggcgaggctctgctgattacacctgtattgcaacctggtaaggccgaagttaccgggtactttccattggggacctggtatgatctgcaaacagtcccggttgaagctcttggaagtcttccacctccacctgctgcaccaagggagcctgcgatccactctgaaggacagtgggtaactttgcctgcaccgctggacaccatcaatgtccatctgcgcgaaggctacatcataccacttcaaggtcctggactgaccactacagagtctagaaaacaaccaatggctcttgctgttgcactgactaaaagcggcgaagcaaggggtgagctgttctgggacgacggagagtcactggaggtactcgaacgaggcgcgtatacgcaggtcatttttgaggctcgcaataatacgatcgttaacgagctggtccacgtcacttcagaaggtgcaggccttcagttgggcaaggtaactgtcctgggagttgctacagcaccgcagcaggtcttgtccaacggacggcccgtaagcaactttacctatagtcctgataccaaagttctggacatctgcgttgctctgctgatgggtgagcagttcctggtatcatggtgc

SEQ ID NO: 210 - protein, 944 aa, synthetic construct
  REGION 1..944: note = Variant of the Homo Sapiens Lysosomal alpha-glucosidase
MEWSWVFLFFLSVTTGVHSGHILWHDFSTVPRELSGSSQVLEETHPAHQVGASRPGPRDAQLHPGRPRAVPTQCDVPENSRFDCAPEKAITQEQCEARGCCYIPAKQGLQGAQMGQPWCFFPPSYPSYKLENLSQSEMGYTATLTRTTPSFFPKDILTLRLDVMMETENRLHFTIKDPANRRYEVPLETPHVHSRAPSPLYSVEFSEEPFGVIVRRQLDGRVLLNTTVAPLFFADQFLQLSTSLPSQYITGLAEHLSPLMLSTSWNKITLWNRDLAPTPGANLYGSHPFYLALEDGGSAHGVFLLNSNAMDVVLQPSPALSWRSTGGILDVYIFLGPEPKSVVQQYLDVVGYPFMPPYWGLGFHLCRWGYSSTAITRQVVENMTRAHFPLDVQWNDLDYMDSRRDFTFNKDGFRDFPAMVQELHQGGRRYMMIVDPGISSSGPAGSYRPYDEGLRRGVFITNETGQPLIGKVWPGSTAFPDFTNPEALAWWEDMVAEFHDQVPFDGMWIDMNEPSNFIRGSIDGCPNNELENPPYVPGVVGGTLQAATICASSHQFLSTHYNLHNLYGTTEAIASHRALVKARGTRPFVISRSTFAGHGRYAGHWTGDVWSSWEQLASSVPEILQFNLLGVPLVGADVCGFLGNTSEELCVRWTQLGAFYPFMRNHNSLTSLPQEPYSFSEPAQQAMRKALGLRYALLPHLYTLFHQAHVHGETVARPLFLEFPKDSSTWTVDHQMLWGEALLITPVLQPGKAEVTGYFPLGTWYDLQTVPVEALGSLPPPPAAPREPAIHSEGQWVTLPAPLDTINVHLREGYIIPLQGPGLTTTESRKQPMALAVALTKSGEARGELFWDDGESLEVLERGAYTQVIFEARNNTIVNELVHVTSEGAGLQLGKVTVLGVATAPQQVLSNGRPVSNFTYSPDTKVLDICVALLMGEQFLVSWC

SEQ ID NO: 211 - DNA, 2832 bp, synthetic construct
  misc_feature 1..2832: note = Variant of the Homo Sapiens Lysosomal alpha-glucosidase
  source 1..2832: mol_type = other DNA
atggaatggagctgggtctttctcttcttcctgtcagtaacgactggtgtccactccggacacattctgtggcatgatttttctaccgtgcctagagagctttccggttcaagtcaagtcctcgaagaaacacatccagcccatcaggttggcgcatctaggccgggccctcgggacgctcaactccacccagggagacctagggccgttcccactcagtgcgacgtgccagagaactcacgcttcgattgtgcacctgagaaggctatcacgcaagagcagtgcgaggcccgcggatgttgttacataccggctaaacaggggctgcagggtgcgcagatgggccaaccttggtgcttcttcccaccatcctatccgagttacaagctggagaatctctcccagtctgaaatgggatataccgcaacactgactcggaccaccccctccttctttcccaaagatatcttgactctgagacttgacgtaatgatggagacagaaaacaggctccactttaccattaaggaccctgccaatcgccgatacgaggtgcctctggaaacaccacacgtgcacagtagagctccatcacctctgtattctgtcgagttctccgaagagccgtttggcgttatcgtcaggaggcagctcgacgggcgagtgcttctgaacacgactgtggccccgttgttctttgcggatcagtttctgcaactgtcaacaagtctcccttctcagtacattaccgggcttgcagagcatctgtccccactcatgctgagtacttcatggaacaaaatcacactgtggaatagagaccttgctcctactccaggagccaacttgtatggttctcaccctttctacttggccctggaagatggcggatcagcgcatggcgtattcctcctgaattccaacgcaatggacgttgttcttcagccatctcctgctttgagttggagatctacaggcgggatactggacgtctacatctttctgggtccagagcctaaatccgtagtgcagcagtatcttgatgtcgtcggatacccgtttatgccaccatattggggcctggggttccacttgtgccgctggggatattcatccaccgccattacacgacaagttgttgagaatatgaccagggcacattttcctctggatgtacagtggaacgacctggactacatggatagtcgccgcgacttcaccttcaataaggatgggttcagagactttcctgctatggtccaagaacttcaccagggaggcaggaggtacatgatgatcgtagatccgggaatttcttcttctggcccagccggttcatacagaccgtatgacgaaggactgcgacgaggcgtctttatcacgaacgagactggtcagcctttgataggcaaggtttggccagggtccaccgctttcccggatttcacaaatcctgaggcactggcctggtgggaagatatggtcgccgagtttcacgaccaggtcccatttgacgggatgtggatcgacatgaacgagccatccaacttcattagaggaagtgtggatggctgtccgaataatgagctggaaaaccctccttacgtaccaggcgttgttggtgggactcttcaagctgcgacgatttgcgcatcctcccatcagttcctgtcaacccactataacttgcacaatctgtacgggacaacagaggctatcgccagtcatagggccctggtaaaagctagaggaacacgccctttcgttatctctcgctcaacttttgcaggccacggtaggtatgccggacattggaccggcgacgtctggagttcttgggaacagctggcttcctccgttccagagatattgcagtttaacctgttgggagtcccacttgtaggtgcagatgtttgtggcttcctggggaacacctcagaagaattgtgcgtaagatggactcaactgggcgccttctacccttttatgcgcaatcacaactcactgacatctttgcctcaagaaccgtactcatttagtgagccagcacagcaggccatgaggaaggctcttggcctgagatatgcacttctgccgcatctgtacacccttttccaccaggctcatgtctatggagagactgttgcacgacctctgttcttggagttcccaaaagactcttccacgtggacagtcgatcaccagatgctgtggggcgaggctctgctgattacacctgtattgcaacctggtaaggccgaagttaccgggtactttccattggggacctggtatgatctgcaaacagtcccggttgaagctcttggaagtcttccacctccacctgctgcaccaagggagcctgcgatccactctgaaggacagtgggtaactttgcctgcaccgctggacaccatcaatgtccatctgcgcgaaggctacatcataccacttcaaggtcctggactgaccactacagagtctagaaaacaaccaatggctcttgctgttgcactgactaaaagcggcgaagcaaggggtgagctgttctgggacgacggagagtcactggaggtactcgaacgaggcgcgtatacgcaggtcatttttgaggctcgcaataatacgatcgttaacgagctggtccacgtcacttcagaaggtgcaggccttcagttgggcaaggtaactgtcctgggagttgctacagcaccgcagcaggtcttgtccaacggacggcccgtaagcaactttacctatagtcctgataccaaagttctggacatctgcgttgctctgctgatgggtgagcagttcctggtatcatggtgc

SEQ ID NO: 212 - protein, 944 aa, synthetic construct
  REGION 1..944: note = Variant of the Homo Sapiens Lysosomal alpha-glucosidase
MEWSWVFLFFLSVTTGVHSGHILWHDFSTVPRELSGSSQVLEETHPAHQVGASRPGPRDAQLHPGRPRAVPTQCDVPENSRFDCAPEKAITQEQCEARGCCYIPAKQGLQGAQMGQPWCFFPPSYPSYKLENLSQSEMGYTATLTRTTPSFFPKDILTLRLDVMMETENRLHFTIKDPANRRYEVPLETPHVHSRAPSPLYSVEFSEEPFGVIVRRQLDGRVLLNTTVAPLFFADQFLQLSTSLPSQYITGLAEHLSPLMLSTSWNKITLWNRDLAPTPGANLYGSHPFYLALEDGGSAHGVFLLNSNAMDVVLQPSPALSWRSTGGILDVYIFLGPEPKSVVQQYLDVVGYPFMPPYWGLGFHLCRWGYSSTAITRQVVENMTRAHFPLDVQWNDLDYMDSRRDFTFNKDGFRDFPAMVQELHQGGRRYMMIVDPGISSSGPAGSYRPYDEGLRRGVFITNETGQPLIGKVWPGSTAFPDFTNPEALAWWEDMVAEFHDQVPFDGMWIDMNEPSNFIRGSVDGCPNNELENPPYVPGVVGGTLQAATICASSHQFLSTHYNLHNLYGTTEAIASHRALVKARGTRPFVISRSTFAGHGRYAGHWTGDVWSSWEQLASSVPEILQFNLLGVPLVGADVCGFLGNTSEELCVRWTQLGAFYPFMRNHNSLTSLPQEPYSFSEPAQQAMRKALGLRYALLPHLYTLFHQAHVYGETVARPLFLEFPKDSSTWTVDHQMLWGEALLITPVLQPGKAEVTGYFPLGTWYDLQTVPVEALGSLPPPPAAPREPAIHSEGQWVTLPAPLDTINVHLREGYIIPLQGPGLTTTESRKQPMALAVALTKSGEARGELFWDDGESLEVLERGAYTQVIFEARNNTIVNELVHVTSEGAGLQLGKVTVLGVATAPQQVLSNGRPVSNFTYSPDTKVLDICVALLMGEQFLVSWC

SEQ ID NO: 213 - DNA, 2832 bp, synthetic construct
  misc_feature 1..2832: note = Variant of the Homo Sapiens Lysosomal alpha-glucosidase
  source 1..2832: mol_type = other DNA
atggaatggagctgggtctttctcttcttcctgtcagtaacgactggtgtccactccggacacattctgtggcatgatttttctaccgtgcctagagagctttccggttcaagtcaagtcctcgaagaaacacatccagcccatcaggagggcgcatctaggccgggccctcgggacgctcaactccacccagggagacctagggccgttcccactcagtgcgacgtgccagagaactcacgcttcgattgtgcacctgagaaggctatcacgcaagagcagtgcgaggcccgcggatgttgttacataccggctaaacaggggctgcagggtgcgcagatgggccaaccttggtgcttcttcccaccatcctatccgagttacaagctggagaatctctcccagtctgaaatgggatataccgcaacactgactcggaccaccccctccttctttcccaaagatatcttgactctgagacttgacgtaatgatggagacagaaaacaggctccactttaccattaaggaccctgccaatcgccgatacgaggtgcctctggaaacaccacacgtgcacagtagagctccatcacctctgtattctgtcgagttctccgaagagccgtttggcgttatcgtcaggaggcagctcgacgggcgagtgcttctgaacacgactgtggccccgttgttctttgcggatcagtttctgcaactgtcaacaagtctcccttctcagtacattaccgggcttgcagagcatctgtccccactcatgctgagtacttcatggaacaaaatcacactgtggaatagagaccttgctcctactccaggagccaacttgtatggttctcaccctttctacttggccctggaagatggcggatcagcgcatggcgtattcctcctgaattccaacgcaatggacgttgttcttcagccatctcctgctttgagttggagatctacaggcgggatactggacgtctacatctttctgggtccagagcctaaatccgtagtgcagcagtatcttgatgtcgtcggatacccgtttatgccaccatattggggcctggggttccacttgtgccgctggggatattcatccaccgccattacacgacaagttgttgagaatatgaccagggcacattttcctctggatgtacagtggaacgacctggactacatggatagtcgccgcgacttcaccttcaataaggatgggttcagagactttcctgctatggtccaagaacttcaccagggaggcaggaggtacatgatgatcgtagatccgggaatttcttcttctggcccagccggttcatacagaccgtatgacgaaggactgcgacgaggcgtctttatcacgaacgagactggtcagcctttgataggcaaggtttggccagggtccaccgctttcccggatttcacaaatcctgaggcactggcctggtgggaagatatggtcgccgagtttcacgaccaggtcccatttgacgggatgtggatcgacatgaacgagccatccaacttcattagaggaagtgtggatggctgtccgaataatgagctggaaaaccctccttacgtaccaggcgttgttggtgggactcttcaagctgcgacgatttgcgcatcctcccatcagttcctgtcaacccactataacttgcacaatctgtacgggacaacagaggctatcgccagtcatagggccctggtaaaagctagaggaacacgccctttcgttatctctcgctcaacttttgcaggccacggtaggtatgccggacattggaccggcgacgtctggagttcttgggaacagctggcttcctccgttccagagatattgcagtttaacctgttgggagtcccacttgtaggtgcagatgtttgtggcttcctggggaacacctcagaagaattgtgcgtaagatggactcaactgggcgccttctacccttttatgcgcaatcacaactcactgacatctttgcctcaagaaccgtactcatttagtgagccagcacagcaggccatgaggaaggctcttggcctgagatatgcacttctgccgcatctgtacacccttttccaccaggctcatgtccatggagagactgttgcacgacctctgttcttggagttcccaaaagactcttccacgtggacagtcgatcaccagatgctgtggggcgaggctctgctgattacacctgtattgcaacctggtaaggccgaagttaccgggtactttccattggggacctggtatgatctgcaaacagtcccggttgaagctcttggaagtcttccacctccacctgctgcaccaagggagcctgcgatccactctgaaggacagtgggtaactttgcctgcaccgctggacaccatcaatgtccatctgcgcgaaggctacatcataccacttcaaggtcctggactgaccactacagagtctagaaaacaaccaatggctcttgctgttgcactgactaaaagcggcgaagcaaggggtgagctgttctgggacgacggagagtcactggaggtactcgaacgaggcgcgtatacgcaggtcatttttgaggctcgcaataatacgatcgttaacgagctggtccacgtcacttcagaaggtgcaggccttcagttgggcaaggtaactgtcctgggagttgctacagcaccgcagcaggtcttgtccaacggacggcccgtaagcaactttacctatagtcctgataccaaagttctggacatctgcgttgctctgctgatgggtgagcagttcctggtatcatggtgc

SEQ ID NO: 214 - protein, 944 aa, synthetic construct
  REGION 1..944: note = Variant of the Homo Sapiens Lysosomal alpha-glucosidase
MEWSWVFLFFLSVTTGVHSGHILWHDFSTVPRELSGSSQVLEETHPAHQEGASRPGPRDAQLHPGRPRAVPTQCDVPENSRFDCAPEKAITQEQCEARGCCYIPAKQGLQGAQMGQPWCFFPPSYPSYKLENLSQSEMGYTATLTRTTPSFFPKDILTLRLDVMMETENRLHFTIKDPANRRYEVPLETPHVHSRAPSPLYSVEFSEEPFGVIVRRQLDGRVLLNTTVAPLFFADQFLQLSTSLPSQYITGLAEHLSPLMLSTSWNKITLWNRDLAPTPGANLYGSHPFYLALEDGGSAHGVFLLNSNAMDVVLQPSPALSWRSTGGILDVYIFLGPEPKSVVQQYLDVVGYPFMPPYWGLGFHLCRWGYSSTAITRQVVENMTRAHFPLDVQWNDLDYMDSRRDFTFNKDGFRDFPAMVQELHQGGRRYMMIVDPGISSSGPAGSYRPYDEGLRRGVFITNETGQPLIGKVWPGSTAFPDFTNPEALAWWEDMVAEFHDQVPFDGMWIDMNEPSNFIRGSVDGCPNNELENPPYVPGVVGGTLQAATICASSHQFLSTHYNLHNLYGTTEAIASHRALVKARGTRPFVISRSTFAGHGRYAGHWTGDVWSSWEQLASSVPEILQFNLLGVPLVGADVCGFLGNTSEELCVRWTQLGAFYPFMRNHNSLTSLPQEPYSFSEPAQQAMRKALGLRYALLPHLYTLFHQAHVHGETVARPLFLEFPKDSSTWTVDHQMLWGEALLITPVLQPGKAEVTGYFPLGTWYDLQTVPVEALGSLPPPPAAPREPAIHSEGQWVTLPAPLDTINVHLREGYIIPLQGPGLTTTESRKQPMALAVALTKSGEARGELFWDDGESLEVLERGAYTQVIFEARNNTIVNELVHVTSEGAGLQLGKVTVLGVATAPQQVLSNGRPVSNFTYSPDTKVLDICVALLMGEQFLVSWC

SEQ ID NO: 215 - DNA, 2832 bp, synthetic construct
  misc_feature 1..2832: note = Variant of the Homo Sapiens Lysosomal alpha-glucosidase
  source 1..2832: mol_type = other DNA
atggaatggagctgggtctttctcttcttcctgtcagtaacgactggtgtccactccggacacattctgtggcatgatttttctaccgtgcctagagagctttccggttcaagtcaagtcctcgaagaaacacatccagcccatcaggttggcgcatctaggccgggccctcgggacgctcaagttcacccagggagacctagggccgttcccactcagtgcgacgtgccagagaactcacgcttcgattgtgcacctgagaaggctatcacgcaagagcagtgcgaggcccgcggatgttgttacataccggctaaacaggggctgcagggtgcgcagatgggccaaccttggtgcttcttcccaccatcctatccgagttacaagctggagaatctctcccagtctgaaatgggatataccgcaacactgactcggaccaccccctccttctttcccaaagatatcttgactctgagacttgacgtaatgatggagacagaaaacaggctccactttaccattaaggaccctgccaatcgccgatacgaggtgcctctggaaacaccacacgtgcacagtagagctccatcacctctgtattctgtcgagttctccgaagagccgtttggcgttatcgtcaggaggcagctcgacgggcgagtgcttctgaacacgactgtggccccgttgttctttgcggatcagtttctgcaactgtcaacaagtctcccttctcagtacattaccgggcttgcagagcatctgtccccactcatgctgagtacttcatggaacaaaatcacactgtggaatagagaccttgctcctactccaggagccaacttgtatggttctcaccctttctacttggccctggaagatggcggatcagcgcatggcgtattcctcctgaattccaacgcaatggacgttgttcttcagccatctcctgctttgagttggagatctacaggcgggatactggacgtctacatctttctgggtccagagcctaaatccgtagtgcagcagtatcttgatgtcgtcggatacccgtttatgccaccatattggggcctggggttccacttgtgccgctggggatattcatccaccgccattacacgacaagttgttgagaatatgaccagggcacattttcctctggatgtacagtggaacgacctggactacatggatagtcgccgcgacttcaccttcaataaggatgggttcagagactttcctgctatggtccaagaacttcaccagggaggcaggaggtacatgatgatcgtagatccgggaatttcttcttctggcccagccggttcatacagaccgtatgacgaaggactgcgacgaggcgtctttatcacgaacgagactggtcagcctttgataggcaaggtttggccagggtccaccgctttcccggatttcacaaatcctgaggcactggcctggtgggaagatatggtcgccgagtttcacgaccaggtcccatttgacgggatgtggatcgacatgaacgagccatccaacttcattagaggaagtgtggatggctgtccgaataatgagctggaaaaccctccttacgtaccaggcgttgttggtgggactcttcaagctgcgacgatttgcgcatcctcccatcagttcctgtcaacccactataacttgcacaatctgtacgggacaacagaggctatcgccagtcatagggccctggtaaaagctagaggaacacgccctttcgttatctctcgctcaacttttgcaggccacggtaggtatgccggacattggaccggcgacgtctggagttcttgggaacagctggcttcctccgttccagagatattgcagtttaacctgttgggagtcccacttgtaggtgcagatgtttgtggcttcctggggaacacctcagaagaattgtgcgtaagatggactcaactgggcgccttctacccttttatgcgcaatcacaactcactgacatctttgcctcaagaaccgtactcatttagtgagccagcacagcaggccatgaggaaggctcttggcctgagatatgcacttctgccgcatctgtacacccttttccaccaggctcatgtccatggagagactgttgcacgacctctgttcttggagttcccaaaagactcttccacgtggacagtcgatcaccagatgctgtggggcgaggctctgctgattacacctgtattgcaacctggtaaggccgaagttaccgggtactttccattggggacctggtatgatctgcaaacagtcccggttgaagctcttggaagtcttccacctccacctgctgcaccaagggagcctgcgatccactctgaaggacagtgggtaactttgcctgcaccgctggacaccatcaatgtccatctgcgcgaaggctacatcataccacttcaaggtcctggactgaccactacagagtctagaaaacaaccaatggctcttgctgttgcactgactaaaagcggcgaagcaaggggtgagctgttctgggacgacggagagtcactggaggtactcgaacgaggcgcgtatacgcaggtcatttttgaggctcgcaataatacgatcgttaacgagctggtccacgtcacttcagaaggtgcaggccttcagttgggcaaggtaactgtcctgggagttgctacagcaccgcagcaggtcttgtccaacggacggcccgtaagcaactttacctatagtcctgataccaaagttctggacatctgcgttgctctgctgatgggtgagcagttcctggtatcatggtgc

SEQ ID NO: 216 - protein, 944 aa, synthetic construct
  REGION 1..944: note = Variant of the Homo Sapiens Lysosomal alpha-glucosidase
MEWSWVFLFFLSVTTGVHSGHILWHDFSTVPRELSGSSQVLEETHPAHQVGASRPGPRDAQVHPGRPRAVPTQCDVPENSRFDCAPEKAITQEQCEARGCCYIPAKQGLQGAQMGQPWCFFPPSYPSYKLENLSQSEMGYTATLTRTTPSFFPKDILTLRLDVMMETENRLHFTIKDPANRRYEVPLETPHVHSRAPSPLYSVEFSEEPFGVIVRRQLDGRVLLNTTVAPLFFADQFLQLSTSLPSQYITGLAEHLSPLMLSTSWNKITLWNRDLAPTPGANLYGSHPFYLALEDGGSAHGVFLLNSNAMDVVLQPSPALSWRSTGGILDVYIFLGPEPKSVVQQYLDVVGYPFMPPYWGLGFHLCRWGYSSTAITRQVVENMTRAHFPLDVQWNDLDYMDSRRDFTFNKDGFRDFPAMVQELHQGGRRYMMIVDPGISSSGPAGSYRPYDEGLRRGVFITNETGQPLIGKVWPGSTAFPDFTNPEALAWWEDMVAEFHDQVPFDGMWIDMNEPSNFIRGSVDGCPNNELENPPYVPGVVGGTLQAATICASSHQFLSTHYNLHNLYGTTEAIASHRALVKARGTRPFVISRSTFAGHGRYAGHWTGDVWSSWEQLASSVPEILQFNLLGVPLVGADVCGFLGNTSEELCVRWTQLGAFYPFMRNHNSLTSLPQEPYSFSEPAQQAMRKALGLRYALLPHLYTLFHQAHVHGETVARPLFLEFPKDSSTWTVDHQMLWGEALLITPVLQPGKAEVTGYFPLGTWYDLQTVPVEALGSLPPPPAAPREPAIHSEGQWVTLPAPLDTINVHLREGYIIPLQGPGLTTTESRKQPMALAVALTKSGEARGELFWDDGESLEVLERGAYTQVIFEARNNTIVNELVHVTSEGAGLQLGKVTVLGVATAPQQVLSNGRPVSNFTYSPDTKVLDICVALLMGEQFLVSWC

SEQ ID NO: 217 - DNA, 2832 bp, synthetic construct
  misc_feature 1..2832: note = Variant of the Homo Sapiens Lysosomal alpha-glucosidase
  source 1..2832: mol_type = other DNA
atggaatggagctgggtctttctcttcttcctgtcagtaacgactggtgtccactccggacacattctgtggcatgatttttctaccgtgcctagagagctttccggttcaagtcaagtcctcgaagaaacacatccagcccatcaggttggcgcatctaggccgggccctcgggacgctcaactccacccagggagacctagggccgttcccactcagtgcgacgtgccagagaactcacgcttcgattgtgcacctagtaaggctatcacgcaagagcagtgcgaggcccgcggatgttgttacataccggctaaacaggggctgcagggtgcgcagatgggccaaccttggtgcttcttcccaccatcctatccgagttacaagctggagaatctctcccagtctgaaatgggatataccgcaacactgactcggaccaccccctccttctttcccaaagatatcttgactctgagacttgacgtaatgatggagacagaaaacaggctccactttaccattaaggaccctgccaatcgccgatacgaggtgcctctggaaacaccacacgtgcacagtagagctccatcacctctgtattctgtcgagttctccgaagagccgtttggcgttatcgtcaggaggcagctcgacgggcgagtgcttctgaacacgactgtggccccgttgttctttgcggatcagtttctgcaactgtcaacaagtctcccttctcagtacattaccgggcttgcagagcatctgtccccactcatgctgagtacttcatggaacaaaatcacactgtggaatagagaccttgctcctactccaggagccaacttgtatggttctcaccctttctacttggccctggaagatggcggatcagcgcatggcgtattcctcctgaattccaacgcaatggacgttgttcttcagccatctcctgctttgagttggagatctacaggcgggatactggacgtctacatctttctgggtccagagcctaaatccgtagtgcagcagtatcttgatgtcgtcggatacccgtttatgccaccatattggggcctggggttccacttgtgccgctggggatattcatccaccgccattacacgacaagttgttgagaatatgaccagggcacattttcctctggatgtacagtggaacgacctggactacatggatagtcgccgcgacttcaccttcaataaggatgggttcagagactttcctgctatggtccaagaacttcaccagggaggcaggaggtacatgatgatcgtagatccgggaatttcttcttctggcccagccggttcatacagaccgtatgacgaaggactgcgacgaggcgtctttatcacgaacgagactggtcagcctttgataggcaaggtttggccagggtccaccgctttcccggatttcacaaatcctgaggcactggcctggtgggaagatatggtcgccgagtttcacgaccaggtcccatttgacgggatgtggatcgacatgaacgagccatccaacttcattagaggaagtgtggatggctgtccgaataatgagctggaaaaccctccttacgtaccaggcgttgttggtgggactcttcaagctgcgacgatttgcgcatcctcccatcagttcctgtcaacccactataacttgcacaatctgtacgggacaacagaggctatcgccagtcatagggccctggtaaaagctagaggaacacgccctttcgttatctctcgctcaacttttgcaggccacggtaggtatgccggacattggaccggcgacgtctggagttcttgggaacagctggcttcctccgttccagagatattgcagtttaacctgttgggagtcccacttgtaggtgcagatgtttgtggcttcctggggaacacctcagaagaattgtgcgtaagatggactcaactgggcgccttctacccttttatgcgcaatcacaactcactgacatctttgcctcaagaaccgtactcatttagtgagccagcacagcaggccatgaggaaggctcttggcctgagatatgcacttctgccgcatctgtacacccttttccaccaggctcatgtccatggagagactgttgcacgacctctgttcttggagttcccaaaagactcttccacgtggacagtcgatcaccagatgctgtggggcgaggctctgctgattacacctgtattgcaacctggtaaggccgaagttaccgggtactttccattggggacctggtatgatctgcaaacagtcccggttgaagctcttggaagtcttccacctccacctgctgcaccaagggagcctgcgatccactctgaaggacagtgggtaactttgcctgcaccgctggacaccatcaatgtccatctgcgcgaaggctacatcataccacttcaaggtcctggactgaccactacagagtctagaaaacaaccaatggctcttgctgttgcactgactaaaagcggcgaagcaaggggtgagctgttctgggacgacggagagtcactggaggtactcgaacgaggcgcgtatacgcaggtcatttttgaggctcgcaataatacgatcgttaacgagctggtccacgtcacttcagaaggtgcaggccttcagttgggcaaggtaactgtcctgggagttgctacagcaccgcagcaggtcttgtccaacggacggcccgtaagcaactttacctatagtcctgataccaaagttctggacatctgcgttgctctgctgatgggtgagcagttcctggtatcatggtgc

SEQ ID NO: 218 - protein, 944 aa, synthetic construct
  REGION 1..944: note = Variant of the Homo Sapiens Lysosomal alpha-glucosidase
MEWSWVFLFFLSVTTGVHSGHILWHDFSTVPRELSGSSQVLEETHPAHQVGASRPGPRDAQLHPGRPRAVPTQCDVPENSRFDCAPSKAITQEQCEARGCCYIPAKQGLQGAQMGQPWCFFPPSYPSYKLENLSQSEMGYTATLTRTTPSFFPKDILTLRLDVMMETENRLHFTIKDPANRRYEVPLETPHVHSRAPSPLYSVEFSEEPFGVIVRRQLDGRVLLNTTVAPLFFADQFLQLSTSLPSQYITGLAEHLSPLMLSTSWNKITLWNRDLAPTPGANLYGSHPFYLALEDGGSAHGVFLLNSNAMDVVLQPSPALSWRSTGGILDVYIFLGPEPKSVVQQYLDVVGYPFMPPYWGLGFHLCRWGYSSTAITRQVVENMTRAHFPLDVQWNDLDYMDSRRDFTFNKDGFRDFPAMVQELHQGGRRYMMIVDPGISSSGPAGSYRPYDEGLRRGVFITNETGQPLIGKVWPGSTAFPDFTNPEALAWWEDMVAEFHDQVPFDGMWIDMNEPSNFIRGSVDGCPNNELENPPYVPGVVGGTLQAATICASSHQFLSTHYNLHNLYGTTEAIASHRALVKARGTRPFVISRSTFAGHGRYAGHWTGDVWSSWEQLASSVPEILQFNLLGVPLVGADVCGFLGNTSEELCVRWTQLGAFYPFMRNHNSLTSLPQEPYSFSEPAQQAMRKALGLRYALLPHLYTLFHQAHVHGETVARPLFLEFPKDSSTWTVDHQMLWGEALLITPVLQPGKAEVTGYFPLGTWYDLQTVPVEALGSLPPPPAAPREPAIHSEGQWVTLPAPLDTINVHLREGYIIPLQGPGLTTTESRKQPMALAVALTKSGEARGELFWDDGESLEVLERGAYTQVIFEARNNTIVNELVHVTSEGAGLQLGKVTVLGVATAPQQVLSNGRPVSNFTYSPDTKVLDICVALLMGEQFLVSWC

SEQ ID NO: 219 - DNA, 2832 bp, synthetic construct
  misc_feature 1..2832: note = Variant of the Homo Sapiens Lysosomal alpha-glucosidase
  source 1..2832: mol_type = other DNA
atggaatggagctgggtctttctcttcttcctgtcagtaacgactggtgtccactccggacacattctgtggcatgatttttctaccgtgcctagagagctttccggttcaagtcaagtcctcgaagaaacacatccagcccatcaggttggcgcatctaggccgggccctcgggacgctcaaaatcacccagggagacctagggccgttcccactcagtgcgacgtgccagagaactcacgcttcgattgtgcacctgagaaggctatcacgcaagagcagtgcgaggcccgcggatgttgttacataccggctaaacaggggctgcagggtgcgcagatgggccaaccttggtgcttcttcccaccatcctatccgagttacaagctggagaatctctcccagtctgaaatgggatataccgcaacactgactcggaccaccccctccttctttcccaaagatatcttgactctgagacttgacgtaatgatggagacagaaaacaggctccactttaccattaaggaccctgccaatcgccgatacgaggtgcctctggaaacaccacacgtgcacagtagagctccatcacctctgtattctgtcgagttctccgaagagccgtttggcgttatcgtcaggaggcagctcgacgggcgagtgcttctgaacacgactgtggccccgttgttctttgcggatcagtttctgcaactgtcaacaagtctcccttctcagtacattaccgggcttgcagagcatctgtccccactcatgctgagtacttcatggaacaaaatcacactgtggaatagagaccttgctcctactccaggagccaacttgtatggttctcaccctttctacttggccctggaagatggcggatcagcgcatggcgtattcctcctgaattccaacgcaatggacgttgttcttcagccatctcctgctttgagttggagatctacaggcgggatactggacgtctacatctttctgggtccagagcctaaatccgtagtgcagcagtatcttgatgtcgtcggatacccgtttatgccaccatattggggcctggggttccacttgtgccgctggggatattcatccaccgccattacacgacaagttgttgagaatatgaccagggcacattttcctctggatgtacagtggaacgacctggactacatggatagtcgccgcgacttcaccttcaataaggatgggttcagagactttcctgctatggtccaagaacttcaccagggaggcaggaggtacatgatgatcgtagatccgggaatttcttcttctggcccagccggttcatacagaccgtatgacgaaggactgcgacgaggcgtctttatcacgaacgagactggtcagcctttgataggcaaggtttggccagggtccaccgctttcccggatttcacaaatcctgaggcactggcctggtgggaagatatggtcgccgagtttcacgaccaggtcccatttgacgggatgtggatcgacatgaacgagccatccaacttcattagaggaagtgtggatggctgtccgaataatgagctggaaaaccctccttacgtaccaggcgttgttggtgggactcttcaagctgcgacgatttgcgcatcctcccatcagttcctgtcaacccactataacttgcacaatctgtacgggacaacagaggctatcgccagtcatagggccctggtaaaagctagaggaacacgccctttcgttatctctcgctcaacttttgcaggccacggtaggtatgccggacattggaccggcgacgtctggagttcttgggaacagctggcttcctccgttccagagatattgcagtttaacctgttgggagtcccacttgtaggtgcagatgtttgtggcttcctggggaacacctcagaagaattgtgcgtaagatggactcaactgggcgccttctacccttttatgcgcaatcacaactcactgacatctttgcctcaagaaccgtactcatttagtgagccagcacagcaggccatgaggaaggctcttggcctgagatatgcacttctgccgcatctgtacacccttttccaccaggctcatgtccatggagagactgttgcacgacctctgttcttggagttcccaaaagactcttccacgtggacagtcgatcaccagatgctgtggggcgaggctctgctgattacacctgtattgcaacctggtaaggccgaagttaccgggtactttccattggggacctggtatgatctgcaaacagtcccggttgaagctcttggaagtcttccacctccacctgctgcaccaagggagcctgcgatccactctgaaggacagtgggtaactttgcctgcaccgctggacaccatcaatgtccatctgcgcgaaggctacatcataccacttcaaggtcctggactgaccactacagagtctagaaaacaaccaatggctcttgctgttgcactgactaaaagcggcgaagcaaggggtgagctgttctgggacgacggagagtcactggaggtactcgaacgaggcgcgtatacgcaggtcatttttgaggctcgcaataatacgatcgttaacgagctggtccacgtcacttcagaaggtgcaggccttcagttgggcaaggtaactgtcctgggagttgctacagcaccgcagcaggtcttgtccaacggacggcccgtaagcaactttacctatagtcctgataccaaagttctggacatctgcgttgctctgctgatgggtgagcagttcctggtatcatggtgc

SEQ ID NO: 220 - protein, 944 aa, synthetic construct
  REGION 1..944: note = Variant of the Homo Sapiens Lysosomal alpha-glucosidase
MEWSWVFLFFLSVTTGVHSGHILWHDFSTVPRELSGSSQVLEETHPAHQVGASRPGPRDAQNHPGRPRAVPTQCDVPENSRFDCAPEKAITQEQCEARGCCYIPAKQGLQGAQMGQPWCFFPPSYPSYKLENLSQSEMGYTATLTRTTPSFFPKDILTLRLDVMMETENRLHFTIKDPANRRYEVPLETPHVHSRAPSPLYSVEFSEEPFGVIVRRQLDGRVLLNTTVAPLFFADQFLQLSTSLPSQYITGLAEHLSPLMLSTSWNKITLWNRDLAPTPGANLYGSHPFYLALEDGGSAHGVFLLNSNAMDVVLQPSPALSWRSTGGILDVYIFLGPEPKSVVQQYLDVVGYPFMPPYWGLGFHLCRWGYSSTAITRQVVENMTRAHFPLDVQWNDLDYMDSRRDFTFNKDGFRDFPAMVQELHQGGRRYMMIVDPGISSSGPAGSYRPYDEGLRRGVFITNETGQPLIGKVWPGSTAFPDFTNPEALAWWEDMVAEFHDQVPFDGMWIDMNEPSNFIRGSVDGCPNNELENPPYVPGVVGGTLQAATICASSHQFLSTHYNLHNLYGTTEAIASHRALVKARGTRPFVISRSTFAGHGRYAGHWTGDVWSSWEQLASSVPEILQFNLLGVPLVGADVCGFLGNTSEELCVRWTQLGAFYPFMRNHNSLTSLPQEPYSFSEPAQQAMRKALGLRYALLPHLYTLFHQAHVHGETVARPLFLEFPKDSSTWTVDHQMLWGEALLITPVLQPGKAEVTGYFPLGTWYDLQTVPVEALGSLPPPPAAPREPAIHSEGQWVTLPAPLDTINVHLREGYIIPLQGPGLTTTESRKQPMALAVALTKSGEARGELFWDDGESLEVLERGAYTQVIFEARNNTIVNELVHVTSEGAGLQLGKVTVLGVATAPQQVLSNGRPVSNFTYSPDTKVLDICVALLMGEQFLVSWC

SEQ ID NO: 221 - DNA, 2832 bp, synthetic construct
  misc_feature 1..2832: note = Variant of the Homo Sapiens Lysosomal alpha-glucosidase
  source 1..2832: mol_type = other DNA
atggaatggagctgggtctttctcttcttcctgtcagtaacgactggtgtccactccggacacattctgtggcatgatttttctaccgtgcctagagagctttccggttcaagtcaagtcctcgaagaaacacatccagcccatcaggttggcgcatctaggccgggccctcgggacgctcaactccacccagggagacctagggccgttcccactcagtgcgacgtgccagagaactcacgcttcgattgtgcacctcataaggctatcacgcaagagcagtgcgaggcccgcggatgttgttacataccggctaaacaggggctgcagggtgcgcagatgggccaaccttggtgcttcttcccaccatcctatccgagttacaagctggagaatctctcccagtctgaaatgggatataccgcaacactgactcggaccaccccctccttctttcccaaagatatcttgactctgagacttgacgtaatgatggagacagaaaacaggctccactttaccattaaggaccctgccaatcgccgatacgaggtgcctctggaaacaccacacgtgcacagtagagctccatcacctctgtattctgtcgagttctccgaagagccgtttggcgttatcgtcaggaggcagctcgacgggcgagtgcttctgaacacgactgtggccccgttgttctttgcggatcagtttctgcaactgtcaacaagtctcccttctcagtacattaccgggcttgcagagcatctgtccccactcatgctgagtacttcatggaacaaaatcacactgtggaatagagaccttgctcctactccaggagccaacttgtatggttctcaccctttctacttggccctggaagatggcggatcagcgcatggcgtattcctcctgaattccaacgcaatggacgttgttcttcagccatctcctgctttgagttggagatctacaggcgggatactggacgtctacatctttctgggtccagagcctaaatccgtagtgcagcagtatcttgatgtcgtcggatacccgtttatgccaccatattggggcctggggttccacttgtgccgctggggatattcatccaccgccattacacgacaagttgttgagaatatgaccagggcacattttcctctggatgtacagtggaacgacctggactacatggatagtcgccgcgacttcaccttcaataaggatgggttcagagactttcctgctatggtccaagaacttcaccagggaggcaggaggtacatgatgatcgtagatccgggaatttcttcttctggcccagccggttcatacagaccgtatgacgaaggactgcgacgaggcgtctttatcacgaacgagactggtcagcctttgataggcaaggtttggccagggtccaccgctttcccggatttcacaaatcctgaggcactggcctggtgggaagatatggtcgccgagtttcacgaccaggtcccatttgacgggatgtggatcgacatgaacgagccatccaacttcattagaggaagtgtggatggctgtccgaataatgagctggaaaaccctccttacgtaccaggcgttgttggtgggactcttcaagctgcgacgatttgcgcatcctcccatcagttcctgtcaacccactataacttgcacaatctgtacgggacaacagaggctatcgccagtcatagggccctggtaaaagctagaggaacacgccctttcgttatctctcgctcaacttttgcaggccacggtaggtatgccggacattggaccggcgacgtctggagttcttgggaacagctggcttcctccgttccagagatattgcagtttaacctgttgggagtcccacttgtaggtgcagatgtttgtggcttcctggggaacacctcagaagaattgtgcgtaagatggactcaactgggcgccttctacccttttatgcgcaatcacaactcactgacatctttgcctcaagaaccgtactcatttagtgagccagcacagcaggccatgaggaaggctcttggcctgagatatgcacttctgccgcatctgtacacccttttccaccaggctcatgtccatggagagactgttgcacgacctctgttcttggagttcccaaaagactcttccacgtggacagtcgatcaccagatgctgtggggcgaggctctgctgattacacctgtattgcaacctggtaaggccgaagttaccgggtactttccattggggacctggtatgatctgcaaacagtcccggttgaagctcttggaagtcttccacctccacctgctgcaccaagggagcctgcgatccactctgaaggacagtgggtaactttgcctgcaccgctggacaccatcaatgtccatctgcgcgaaggctacatcataccacttcaaggtcctggactgaccactacagagtctagaaaacaaccaatggctcttgctgttgcactgactaaaagcggcgaagcaaggggtgagctgttctgggacgacggagagtcactggaggtactcgaacgaggcgcgtatacgcaggtcatttttgaggctcgcaataatacgatcgttaacgagctggtccacgtcacttcagaaggtgcaggccttcagttgggcaaggtaactgtcctgggagttgctacagcaccgcagcaggtcttgtccaacggacggcccgtaagcaactttacctatagtcctgataccaaagttctggacatctgcgttgctctgctgatgggtgagcagttcctggtatcatggtgc

SEQ ID NO: 222 - protein, 944 aa, synthetic construct
  REGION 1..944: note = Variant of the Homo Sapiens Lysosomal alpha-glucosidase
MEWSWVFLFFLSVTTGVHSGHILWHDFSTVPRELSGSSQVLEETHPAHQVGASRPGPRDAQLHPGRPRAVPTQCDVPENSRFDCAPHKAITQEQCEARGCCYIPAKQGLQGAQMGQPWCFFPPSYPSYKLENLSQSEMGYTATLTRTTPSFFPKDILTLRLDVMMETENRLHFTIKDPANRRYEVPLETPHVHSRAPSPLYSVEFSEEPFGVIVRRQLDGRVLLNTTVAPLFFADQFLQLSTSLPSQYITGLAEHLSPLMLSTSWNKITLWNRDLAPTPGANLYGSHPFYLALEDGGSAHGVFLLNSNAMDVVLQPSPALSWRSTGGILDVYIFLGPEPKSVVQQYLDVVGYPFMPPYWGLGFHLCRWGYSSTAITRQVVENMTRAHFPLDVQWNDLDYMDSRRDFTFNKDGFRDFPAMVQELHQGGRRYMMIVDPGISSSGPAGSYRPYDEGLRRGVFITNETGQPLIGKVWPGSTAFPDFTNPEALAWWEDMVAEFHDQVPFDGMWIDMNEPSNFIRGSVDGCPNNELENPPYVPGVVGGTLQAATICASSHQFLSTHYNLHNLYGTTEAIASHRALVKARGTRPFVISRSTFAGHGRYAGHWTGDVWSSWEQLASSVPEILQFNLLGVPLVGADVCGFLGNTSEELCVRWTQLGAFYPFMRNHNSLTSLPQEPYSFSEPAQQAMRKALGLRYALLPHLYTLFHQAHVHGETVARPLFLEFPKDSSTWTVDHQMLWGEALLITPVLQPGKAEVTGYFPLGTWYDLQTVPVEALGSLPPPPAAPREPAIHSEGQWVTLPAPLDTINVHLREGYIIPLQGPGLTTTESRKQPMALAVALTKSGEARGELFWDDGESLEVLERGAYTQVIFEARNNTIVNELVHVTSEGAGLQLGKVTVLGVATAPQQVLSNGRPVSNFTYSPDTKVLDICVALLMGEQFLVSWC

SEQ ID NO: 223 - DNA, 2832 bp, synthetic construct
  misc_feature 1..2832: note = Variant of the Homo Sapiens Lysosomal alpha-glucosidase
  source 1..2832: mol_type = other DNA
atggaatggagctgggtctttctcttcttcctgtcagtaacgactggtgtccactccggacacattctgtggcatgatttttctaccgtgcctagagagctttccggttcaagtcaagtcctcgaagaaacacatccagcccatcaggttggcgcatctaggccgggccctcgggacgctcaactccacccagggagacctagggccgttcccactcagtgcgacgtgccagagaactcacgcttcgattgtgcacctgagaaggctatcacgcaagagcagtgcgaggcccgcggatgttgttacataccggctaaacaggggctgcagggtgcgcagatgggccaaccttggtgcttcttcccaccatcctatccgagttacaagctggagaatctctcccagtctgaaatgggatataccgcaacactgactcggaccaccccctccttctttcccaaagatatcttgactctgagacttgacgtaatgatggagacagaaaacaggctccactttaccattaaggaccctgccaatcgccgatacgaggtgcctctggaaacaccacacgtgcacagtagagctccatcacctctgtattctgtcgagttctccgaagagccgtttggcgttatcgtcaggaggcagctcgacgggcgagtgcttctgaacacgactgtggccccgttgttctttgcggatcagtttctgcaactgtcaacaagtctcccttctcagtacattaccgggcttgcagagcatctgtccccactcatgctgagtacttcatggaacaaaatcacactgtggaatagagaccttgctcctactccaggagccaacttgtatggttctcaccctttctacttggccctggaagatggcggatcagcgcatggcgtattcctcctgaattccaacgcaatggacgttgttcttcagccatctcctgctttgagttggagatctacaggcgggatactggacgtctacatctttctgggtccagagcctaaatccgtagtgcagcagtatcttgatgtcgtcggatacccgtttatgccaccatattggggcctggggttccacttgtgccgctggggatattcatccaccgccattacacgacaagttgttgagaatatgaccagggcacattttcctctggatgtacagtggaacgacctggactacatggatagtcgccgcgacttcaccttcaataaggatgggttcagagactttcctgctatggtccaagaacttcaccagggaggcaggaggtacatgatgatcgtagatccgggaatttcttcttctggcccagccggttcatacagaccgtatgacgaaggactgcgacgaggcgtctttatcacgaacgagactggtcagcctttgataggcaaggtttggccagggtccaccgctttcccggatttcacaaatcctcttgcactggcctggtgggaagatatggtcgccgagtttcacgaccaggtcccatttgacgggatgtggatcgacatgaacgagccatccaacttcattagaggaagtgtggatggctgtccgaataatgagctggaaaaccctccttacgtaccaggcgttgttggtgggactcttcaagctgcgacgatttgcgcatcctcccatcagttcctgtcaacccactataacttgcacaatctgtacgggacaacagaggctatcgccagtcatagggccctggtaaaagctagaggaacacgccctttcgttatctctcgctcaacttttgcaggccacggtaggtatgccggacattggaccggcgacgtctggagttcttgggaacagctggcttcctccgttccagagatattgcagtttaacctgttgggagtcccacttgtaggtgcagatgtttgtggcttcctggggaacacctcagaagaattgtgcgtaagatggactcaactgggcgccttctacccttttatgcgcaatcacaactcactgacatctttgcctcaagaaccgtactcatttagtgagccagcacagcaggccatgaggaaggctcttggcctgagatatgcacttctgccgcatctgtacacccttttccaccaggctcatgtccatggagagactgttgcacgacctctgttcttggagttcccaaaagactcttccacgtggacagtcgatcaccagatgctgtggggcgaggctctgctgattacacctgtattgcaacctggtaaggccgaagttaccgggtactttccattggggacctggtatgatctgcaaacagtcccggttgaagctcttggaagtcttccacctccacctgctgcaccaagggagcctgcgatccactctgaaggacagtgggtaactttgcctgcaccgctggacaccatcaatgtccatctgcgcgaaggctacatcataccacttcaaggtcctggactgaccactacagagtctagaaaacaaccaatggctcttgctgttgcactgactaaaagcggcgaagcaaggggtgagctgttctgggacgacggagagtcactggaggtactcgaacgaggcgcgtatacgcaggtcatttttgaggctcgcaataatacgatcgttaacgagctggtccacgtcacttcagaaggtgcaggccttcagttgggcaaggtaactgtcctgggagttgctacagcaccgcagcaggtcttgtccaacggacggcccgtaagcaactttacctatagtcctgataccaaagttctggacatctgcgttgctctgctgatgggtgagcagttcctggtatcatggtgc

SEQ ID NO: 224 - protein, 944 aa, synthetic construct
  REGION 1..944: note = Variant of the Homo Sapiens Lysosomal alpha-glucosidase
MEWSWVFLFFLSVTTGVHSGHILWHDFSTVPRELSGSSQVLEETHPAHQVGASRPGPRDAQLHPGRPRAVPTQCDVPENSRFDCAPEKAITQEQCEARGCCYIPAKQGLQGAQMGQPWCFFPPSYPSYKLENLSQSEMGYTATLTRTTPSFFPKDILTLRLDVMMETENRLHFTIKDPANRRYEVPLETPHVHSRAPSPLYSVEFSEEPFGVIVRRQLDGRVLLNTTVAPLFFADQFLQLSTSLPSQYITGLAEHLSPLMLSTSWNKITLWNRDLAPTPGANLYGSHPFYLALEDGGSAHGVFLLNSNAMDVVLQPSPALSWRSTGGILDVYIFLGPEPKSVVQQYLDVVGYPFMPPYWGLGFHLCRWGYSSTAITRQVVENMTRAHFPLDVQWNDLDYMDSRRDFTFNKDGFRDFPAMVQELHQGGRRYMMIVDPGISSSGPAGSYRPYDEGLRRGVFITNETGQPLIGKVWPGSTAFPDFTNPLALAWWEDMVAEFHDQVPFDGMWIDMNEPSNFIRGSVDGCPNNELENPPYVPGVVGGTLQAATICASSHQFLSTHYNLHNLYGTTEAIASHRALVKARGTRPFVISRSTFAGHGRYAGHWTGDVWSSWEQLASSVPEILQFNLLGVPLVGADVCGFLGNTSEELCVRWTQLGAFYPFMRNHNSLTSLPQEPYSFSEPAQQAMRKALGLRYALLPHLYTLFHQAHVHGETVARPLFLEFPKDSSTWTVDHQMLWGEALLITPVLQPGKAEVTGYFPLGTWYDLQTVPVEALGSLPPPPAAPREPAIHSEGQWVTLPAPLDTINVHLREGYIIPLQGPGLTTTESRKQPMALAVALTKSGEARGELFWDDGESLEVLERGAYTQVIFEARNNTIVNELVHVTSEGAGLQLGKVTVLGVATAPQQVLSNGRPVSNFTYSPDTKVLDICVALLMGEQFLVSWC

SEQ ID NO: 225 - DNA, 2832 bp, synthetic construct
  misc_feature 1..2832: note = Variant of the Homo Sapiens Lysosomal alpha-glucosidase
  source 1..2832: mol_type = other DNA
atggaatggagctgggtctttctcttcttcctgtcagtaacgactggtgtccactccggacacattctgtggcatgatttttctaccgtgcctagagagctttccggttcaagtcaagtcctcgaagaaacacatccagcccatcaggttggcgcatctaggccgggccctcgggacgctcaactccacccagggagacctagggccgttcccactcagtgcgacgtgccagagaactcacgcttcgattgtgcacctgagaaggctatcacgcaagagcagtgcgaggcccgcggatgttgttacataccggctaaacaggggctgcagggtgcgcagatgggccaaccttggtgcttcttcccaccatcctatccgagttacaagctggagaatctctcccagtctgaaatgggatataccgcaacactgactcggaccaccccctccttctttcccaaagatatcttgactctgagacttgacgtaatgatggagacagaaaacaggctccactttaccattaaggaccctgccaatcgccgatacgaggtgcctctggaaacaccacacgtgcacagtagagctccatcacctctgtattctgtcgagttctccgaagagccgtttggcgttatcgtcaggaggcagctcgacgggcgagtgcttctgaacacgactgtggccccgttgttctttgcggatcagtttctgcaactgtcaacaagtctcccttctcagtacattaccgggcttgcagagcatctgtccccactcatgctgagtacttcatggaacaaaatcacactgtggaatagagaccttgctcctactccaggagccaacttgtatggttctcaccctttctacttggccctggaagatggcggatcagcgcatggcgtattcctcctgaattccaacgcaatggacgttgttcttcagccatctcctgctttgagttggagatctacaggcgggatactggacgtctacatctttctgggtccagagcctaaatccgtagtgcagcagtatcttgatgtcgtcggatacccgtttatgccaccatattggggcctggggttccacttgtgccgctggggatattcatccaccgccattacacgacaagttgttgagaatatgaccagggcacattttcctctggatgtacagtggaacgacctggactacatggatagtcgccgcgacttcaccttcaataaggatgggttcagagactttcctgctatggtccaagaacttcaccagggaggcaggaggtacatgatgatcgtagatccgggaatttcttcttctggcccagccggttcatacagaccgtatgacgaaggactgcgacgaggcgtctttatcacgaacgagactggtcagcctttgataggcaaggtttggccagggtccaccgctttcccggatttcacaaatcctgaggcactggcctggtgggaagatatggtcgccgagtttcacgaccaggtcccatttgacgggatgtggatcgacatgaacgagccatccaacttcattagaggaagtgtggatggctgtccgaataatgagctggaaaaccctccttacgtaccaggcgttgttggtgggactcttcaagctgcgacgatttgcgcatcctcccatcagttcctgtcaacccactataacttgcacaatctgtacgggacaacagaggctatcgccagtcatagggccctggtaaaagctagaggaacacgccctttcgttatctctcgctcaacttttgcaggccacggtaggtatgccggacattggaccggcgacgtctggagttcttgggaacagctggcttcctccgttccagagatattgcagtttaacctgttgggagtcccacttgtaggtgcagatgtttgtggcttcctggggaacacctcagaagaattgtgcgtaagatggactcaactgggcgccttctacccttttatgcgcaatcacaactcactgacatctttgcctcaagaaccgtactcatttagtgagccagcacagcaggccatgaggaaggctcttggcctgagatatgcacttctgccgcatctgtacacccttttccaccaggctcatgtccatggagagactgttgcacgacctctgttcttggagttcccaaaagactcttccacgtggacagtcgatcaccagatgctgtggggcgaggctctgctgattacacctgtattgcaacctggtaaggccgaagttaccgggtactttccattggggacctggtatgatctgcaaacagtcccggttgaagctcttggaagtcttccacctccacctgctgcaccaagggagcctgcgatccactctgaaggacagtgggtaactttgcctgcaccgctggacaccatcaatgtccatctgcgcgaaggctacatcataccacttcaaggtcctggactgaccactacagagtctagaaaacaaccaatggctcttgctgttgcactgactaaaagcggcgaagcaaggggtgagctgttctgggacgacggagagtcactggaggtactcgaacgaggcgcgtatacgcaggtcatttttgaggctcgcaataatacgatcgttaacgagctggtccacgtcacttcagaaggtgcaggccttcagttgggcaaggtaactgtcctgggagttgctacagcaccgcagcaggtcttgtccaacggagagcccgtaagcaactttacctatagtcctgataccaaagttctggacatctgcgttgctctgctgatgggtgagcagttcctggtatcatggtgc

SEQ ID NO: 226 - protein, 944 aa, synthetic construct
  REGION 1..944: note = Variant of the Homo Sapiens Lysosomal alpha-glucosidase
MEWSWVFLFFLSVTTGVHSGHILWHDFSTVPRELSGSSQVLEETHPAHQVGASRPGPRDAQLHPGRPRAVPTQCDVPENSRFDCAPEKAITQEQCEARGCCYIPAKQGLQGAQMGQPWCFFPPSYPSYKLENLSQSEMGYTATLTRTTPSFFPKDILTLRLDVMMETENRLHFTIKDPANRRYEVPLETPHVHSRAPSPLYSVEFSEEPFGVIVRRQLDGRVLLNTTVAPLFFADQFLQLSTSLPSQYITGLAEHLSPLMLSTSWNKITLWNRDLAPTPGANLYGSHPFYLALEDGGSAHGVFLLNSNAMDVVLQPSPALSWRSTGGILDVYIFLGPEPKSVVQQYLDVVGYPFMPPYWGLGFHLCRWGYSSTAITRQVVENMTRAHFPLDVQWNDLDYMDSRRDFTFNKDGFRDFPAMVQELHQGGRRYMMIVDPGISSSGPAGSYRPYDEGLRRGVFITNETGQPLIGKVWPGSTAFPDFTNPEALAWWEDMVAEFHDQVPFDGMWIDMNEPSNFIRGSVDGCPNNELENPPYVPGVVGGTLQAATICASSHQFLSTHYNLHNLYGTTEAIASHRALVKARGTRPFVISRSTFAGHGRYAGHWTGDVWSSWEQLASSVPEILQFNLLGVPLVGADVCGFLGNTSEELCVRWTQLGAFYPFMRNHNSLTSLPQEPYSFSEPAQQAMRKALGLRYALLPHLYTLFHQAHVHGETVARPLFLEFPKDSSTWTVDHQMLWGEALLITPVLQPGKAEVTGYFPLGTWYDLQTVPVEALGSLPPPPAAPREPAIHSEGQWVTLPAPLDTINVHLREGYIIPLQGPGLTTTESRKQPMALAVALTKSGEARGELFWDDGESLEVLERGAYTQVIFEARNNTIVNELVHVTSEGAGLQLGKVTVLGVATAPQQVLSNGEPVSNFTYSPDTKVLDICVALLMGEQFLVSWC

SEQ ID NO: 227 - DNA, 2832 bp, synthetic construct
  misc_feature 1..2832: note = Variant of the Homo Sapiens Lysosomal alpha-glucosidase
  source 1..2832: mol_type = other DNA
atggaatggagctgggtctttctcttcttcctgtcagtaacgactggtgtccactccggacacattctgtggcatgatttttctaccgtgcctagagagctttccggttcaagtcaagtcctcgaagaaacacatccagcccatcaggttggcgcatctaggccgggccctcgggacgctcaactccacccagggagacctagggccgttcccactcagtgcgacgtgccagagaactcacgcttcgattgtgcacctgagaaggctatcacgcaagagcagtgcgaggcccgcggatgttgttacataccggctaaacaggggctgcagggtgcgcagatgggccaaccttggtgcttcttcccaccatcctatccgagttacaagctggagaatctctcccagtctgaaatgggatataccgcaacactgactcggaccaccccctccttctttcccaaagatatcttgactctgagacttgacgtaatgatggagacagaaaacaggctccactttaccattaaggaccctgccaatcgccgatacgaggtgcctctggaaacaccacacgtgcacagtagagctccatcacctctgtattctgtcgagttctccgaagagccgtttggcgttatcgtcaggaggcagctcgacgggcgagtgcttctgaacacgactgtggccccgttgttctttgcggatcagtttctgcaactgtcaacaagtctcccttctcagtacattaccgggcttgcagagcatctgtccccactcatgctgagtacttcatggaacaaaatcacactgtggaatagagaccttgctcctactccaggagccaacttgtatggttctcaccctttctacttggccctggaagatggcggatcagcgcatggcgtattcctcctgaattccaacgcaatggacgttgttcttcagccatctcctgctttgagttggagatctacaggcgggatactggacgtctacatctttctgggtccagagcctaaatccgtagtgcagcagtatcttgatgtcgtcggatacccgtttatgccaccatattggggcctggggttccacttgtgccgctggggatattcatccaccgccattacacgacaagttgttgagaatatgaccagggcacattttcctctggatgtacagtggaacgacctggactacatggatagtcgccgcgacttcaccttcaataaggatgggttcagagactttcctgctatggtccaagaacttcaccagggaggcaggaggtacatgatgatcgtagatccgggaatttcttcttctggcccagccggttcatacagaccgtatgacgaaggactgcgacgaggcgtctttatcacgaacgagactggtcagcctttgataggcaaggtttggccagggtccaccgctttcccggatttcacaaatcctgaggcactggcctggtgggaagatatggtcgccgagtttcacgaccaggtcccatttgacgggatgtggatcgacatgaacgagccatccaacttcattagaggaagtgtggatggctgtccgaataatgagctggaaaaccctccttacgtaccaggcgttgttggtgggactcttcaagctgcgacgatttgcgcatcctcccatcagttcctgtcaacccactataacttgcacaatctgtacgggacaacagaggctatcgccagtcatagggccctggtaaaagctagaggaacacgccctttcgttatctctcgctcaacttttgcaggccacggtaggtatgccggacattggaccggcgacgtctggagttcttgggaacagctggcttcctccgttccagagatattgcagtttaacctgttgggagtcccacttgtaggtgcagatgtttgtggcttcctggggaacacctcagaagaattgtgcgtaagatggactcaactgggcgccttctacccttttatgcgcaatcacaactcactgacatctttgcctcaagaaccgtactcatttagtgagccagcacagcaggccatgaggaaggctcttggcctgagatatgcacttctgccgcatctgtacacccttttccaccaggctcatgtcaggggagagactgttgcacgacctctgttcttggagttcccaaaagactcttccacgtggacagtcgatcaccagatgctgtggggcgaggctctgctgattacacctgtattgcaacctggtaaggccgaagttaccgggtactttccattggggacctggtatgatctgcaaacagtcccggttgaagctcttggaagtcttccacctccacctgctgcaccaagggagcctgcgatccactctgaaggacagtgggtaactttgcctgcaccgctggacaccatcaatgtccatctgcgcgaaggctacatcataccacttcaaggtcctggactgaccactacagagtctagaaaacaaccaatggctcttgctgttgcactgactaaaagcggcgaagcaaggggtgagctgttctgggacgacggagagtcactggaggtactcgaacgaggcgcgtatacgcaggtcatttttgaggctcgcaataatacgatcgttaacgagctggtccacgtcacttcagaaggtgcaggccttcagttgggcaaggtaactgtcctgggagttgctacagcaccgcagcaggtcttgtccaacggacggcccgtaagcaactttacctatagtcctgataccaaagttctggacatctgcgttgctctgctgatgggtgagcagttcctggtatcatggtgc

SEQ ID NO: 228 - protein, 944 aa, synthetic construct
  REGION 1..944: note = Variant of the Homo Sapiens Lysosomal alpha-glucosidase
MEWSWVFLFFLSVTTGVHSGHILWHDFSTVPRELSGSSQVLEETHPAHQVGASRPGPRDAQLHPGRPRAVPTQCDVPENSRFDCAPEKAITQEQCEARGCCYIPAKQGLQGAQMGQPWCFFPPSYPSYKLENLSQSEMGYTATLTRTTPSFFPKDILTLRLDVMMETENRLHFTIKDPANRRYEVPLETPHVHSRAPSPLYSVEFSEEPFGVIVRRQLDGRVLLNTTVAPLFFADQFLQLSTSLPSQYITGLAEHLSPLMLSTSWNKITLWNRDLAPTPGANLYGSHPFYLALEDGGSAHGVFLLNSNAMDVVLQPSPALSWRSTGGILDVYIFLGPEPKSVVQQYLDVVGYPFMPPYWGLGFHLCRWGYSSTAITRQVVENMTRAHFPLDVQWNDLDYMDSRRDFTFNKDGFRDFPAMVQELHQGGRRYMMIVDPGISSSGPAGSYRPYDEGLRRGVFITNETGQPLIGKVWPGSTAFPDFTNPEALAWWEDMVAEFHDQVPFDGMWIDMNEPSNFIRGSVDGCPNNELENPPYVPGVVGGTLQAATICASSHQFLSTHYNLHNLYGTTEAIASHRALVKARGTRPFVISRSTFAGHGRYAGHWTGDVWSSWEQLASSVPEILQFNLLGVPLVGADVCGFLGNTSEELCVRWTQLGAFYPFMRNHNSLTSLPQEPYSFSEPAQQAMRKALGLRYALLPHLYTLFHQAHVRGETVARPLFLEFPKDSSTWTVDHQMLWGEALLITPVLQPGKAEVTGYFPLGTWYDLQTVPVEALGSLPPPPAAPREPAIHSEGQWVTLPAPLDTINVHLREGYIIPLQGPGLTTTESRKQPMALAVALTKSGEARGELFWDDGESLEVLERGAYTQVIFEARNNTIVNELVHVTSEGAGLQLGKVTVLGVATAPQQVLSNGRPVSNFTYSPDTKVLDICVALLMGEQFLVSWC

SEQ ID NO: 229 - DNA, 2832 bp, synthetic construct
  misc_feature 1..2832: note = Variant of the Homo Sapiens Lysosomal alpha-glucosidase
  source 1..2832: mol_type = other DNA
atggaatggagctgggtctttctcttcttcctgtcagtaacgactggtgtccactccggacacattctgtggcatgatttttctaccgtgcctagagagctttccggttcaagtggggtcctcgaagaaacacatccagcccatcaggttggcgcatctaggccgggccctcgggacgctcaactccacccagggagacctagggccgttcccactcagtgcgacgtgccagagaactcacgcttcgattgtgcacctgagaaggctatcacgcaagagcagtgcgaggcccgcggatgttgttacataccggctaaacaggggctgcagggtgcgcagatgggccaaccttggtgcttcttcccaccatcctatccgagttacaagctggagaatctctcccagtctgaaatgggatataccgcaacactgactcggaccaccccctccttctttcccaaagatatcttgactctgagacttgacgtaatgatggagacagaaaacaggctccactttaccattaaggaccctgccaatcgccgatacgaggtgcctctggaaacaccacacgtgcacagtagagctccatcacctctgtattctgtcgagttctccgaagagccgtttggcgttatcgtcaggaggcagctcgacgggcgagtgcttctgaacacgactgtggccccgttgttctttgcggatcagtttctgcaactgtcaacaagtctcccttctcagtacattaccgggcttgcagagcatctgtccccactcatgctgagtacttcatggaacaaaatcacactgtggaatagagaccttgctcctactccaggagccaacttgtatggttctcaccctttctacttggccctggaagatggcggatcagcgcatggcgtattcctcctgaattccaacgcaatggacgttgttcttcagccatctcctgctttgagttggagatctacaggcgggatactggacgtctacatctttctgggtccagagcctaaatccgtagtgcagcagtatcttgatgtcgtcggatacccgtttatgccaccatattggggcctggggttccacttgtgccgctggggatattcatccaccgccattacacgacaagttgttgagaatatgaccagggcacattttcctctggatgtacagtggaacgacctggactacatggatagtcgccgcgacttcaccttcaataaggatgggttcagagactttcctgctatggtccaagaacttcaccagggaggcaggaggtacatgatgatcgtagatccgggaatttcttcttctggcccagccggttcatacagaccgtatgacgaaggactgcgacgaggcgtctttatcacgaacgagactggtcagcctttgataggcaaggtttggccagggtccaccgctttcccggatttcacaaatcctgaggcactggcctggtgggaagatatggtcgccgagtttcacgaccaggtcccatttgacgggatgtggatcgacatgaacgagccatccaacttcattagaggaagtgtggatggctgtccgaataatgagctggaaaaccctccttacgtaccaggcgttgttggtgggactcttcaagctgcgacgatttgcgcatcctcccatcagttcctgtcaacccactataacttgcacaatctgtacgggacaacagaggctatcgccagtcatagggccctggtaaaagctagaggaacacgccctttcgttatctctcgctcaacttttgcaggccacggtaggtatgccggacattggaccggcgacgtctggagttcttgggaacagctggcttcctccgttccagagatattgcagtttaacctgttgggagtcccacttgtaggtgcagatgtttgtggcttcctggggaacacctcagaagaattgtgcgtaagatggactcaactgggcgccttctacccttttatgcgcaatcacaactcactgacatctttgcctcaagaaccgtactcatttagtgagccagcacagcaggccatgaggaaggctcttggcctgagatatgcacttctgccgcatctgtacacccttttccaccaggctcatgtccatggagagactgttgcacgacctctgttcttggagttcccaaaagactcttccacgtggacagtcgatcaccagatgctgtggggcgaggctctgctgattacacctgtattgcaacctggtaaggccgaagttaccgggtactttccattggggacctggtatgatctgcaaacagtcccggttgaagctcttggaagtcttccacctccacctgctgcaccaagggagcctgcgatccactctgaaggacagtgggtaactttgcctgcaccgctggacaccatcaatgtccatctgcgcgaaggctacatcataccacttcaaggtcctggactgaccactacagagtctagaaaacaaccaatggctcttgctgttgcactgactaaaagcggcgaagcaaggggtgagctgttctgggacgacggagagtcactggaggtactcgaacgaggcgcgtatacgcaggtcatttttgaggctcgcaataatacgatcgttaacgagctggtccacgtcacttcagaaggtgcaggccttcagttgggcaaggtaactgtcctgggagttgctacagcaccgcagcaggtcttgtccaacggacggcccgtaagcaactttacctatagtcctgataccaaagttctggacatctgcgttgctctgctgatgggtgagcagttcctggtatcatggtgc

SEQ ID NO: 230 - protein, 944 aa, synthetic construct
  REGION 1..944: note = Variant of the Homo Sapiens Lysosomal alpha-glucosidase
MEWSWVFLFFLSVTTGVHSGHILWHDFSTVPRELSGSSGVLEETHPAHQVGASRPGPRDAQLHPGRPRAVPTQCDVPENSRFDCAPEKAITQEQCEARGCCYIPAKQGLQGAQMGQPWCFFPPSYPSYKLENLSQSEMGYTATLTRTTPSFFPKDILTLRLDVMMETENRLHFTIKDPANRRYEVPLETPHVHSRAPSPLYSVEFSEEPFGVIVRRQLDGRVLLNTTVAPLFFADQFLQLSTSLPSQYITGLAEHLSPLMLSTSWNKITLWNRDLAPTPGANLYGSHPFYLALEDGGSAHGVFLLNSNAMDVVLQPSPALSWRSTGGILDVYIFLGPEPKSVVQQYLDVVGYPFMPPYWGLGFHLCRWGYSSTAITRQVVENMTRAHFPLDVQWNDLDYMDSRRDFTFNKDGFRDFPAMVQELHQGGRRYMMIVDPGISSSGPAGSYRPYDEGLRRGVFITNETGQPLIGKVWPGSTAFPDFTNPEALAWWEDMVAEFHDQVPFDGMWIDMNEPSNFIRGSVDGCPNNELENPPYVPGVVGGTLQAATICASSHQFLSTHYNLHNLYGTTEAIASHRALVKARGTRPFVISRSTFAGHGRYAGHWTGDVWSSWEQLASSVPEILQFNLLGVPLVGADVCGFLGNTSEELCVRWTQLGAFYPFMRNHNSLTSLPQEPYSFSEPAQQAMRKALGLRYALLPHLYTLFHQAHVHGETVARPLFLEFPKDSSTWTVDHQMLWGEALLITPVLQPGKAEVTGYFPLGTWYDLQTVPVEALGSLPPPPAAPREPAIHSEGQWVTLPAPLDTINVHLREGYIIPLQGPGLTTTESRKQPMALAVALTKSGEARGELFWDDGESLEVLERGAYTQVIFEARNNTIVNELVHVTSEGAGLQLGKVTVLGVATAPQQVLSNGRPVSNFTYSPDTKVLDICVALLMGEQFLVSWC

SEQ ID NO: 231 - DNA, 2832 bp, synthetic construct
  misc_feature 1..2832: note = Variant of the Homo Sapiens Lysosomal alpha-glucosidase
  source 1..2832: mol_type = other DNA
atggaatggagctgggtctttctcttcttcctgtcagtaacgactggtgtccactccggacacattctgcggcatgatttttctaccgtgcctagagagctttccggttcaagtcaagtcctcgaagaaacacatccagcccatcaggttggcgcatctaggccgggccctcgggacgctcaactccacccagggagacctagggccgttcccactcagtgcgacgtgccagagaactcacgcttcgattgtgcacctgagaaggctatcacgcaagagcagtgcgaggcccgcggatgttgttacataccggctaaacaggggctgcagggtgcgcagatgggccaaccttggtgcttcttcccaccatcctatccgagttacaagctggagaatctctcccagtctgaaatgggatataccgcaacactgactcggaccaccccctccttctttcccaaagatatcttgactctgagacttgacgtaatgatggagacagaaaacaggctccactttaccattaaggaccctgccaatcgccgatacgaggtgcctctggaaacaccacacgtgcacagtagagctccatcacctctgtattctgtcgagttctccgaagagccgtttggcgttatcgtcaggaggcagctcgacgggcgagtgcttctgaacacgactgtggccccgttgttctttgcggatcagtttctgcaactgtcaacaagtctcccttctcagtacattaccgggcttgcagagcatctgtccccactcatgctgagtacttcatggaacaaaatcacactgtggaatagagaccttgctcctactccaggagccaacttgtatggttctcaccctttctacttggccctggaagatggcggatcagcgcatggcgtattcctcctgaattccaacgcaatggacgttgttcttcagccatctcctgctttgagttggagatctacaggcgggatactggacgtctacatctttctgggtccagagcctaaatccgtagtgcagcagtatcttgatgtcgtcggatacccgtttatgccaccatattggggcctggggttccacttgtgccgctggggatattcatccaccgccattacacgacaagttgttgagaatatgaccagggcacattttcctctggatgtacagtggaacgacctggactacatggatagtcgccgcgacttcaccttcaataaggatgggttcagagactttcctgctatggtccaagaacttcaccagggaggcaggaggtacatgatgatcgtagatccgggaatttcttcttctggcccagccggttcatacagaccgtatgacgaaggactgcgacgaggcgtctttatcacgaacgagactggtcagcctttgataggcaaggtttggccagggtccaccgctttcccggatttcacaaatcctgaggcactggcctggtgggaagatatggtcgccgagtttcacgaccaggtcccatttgacgggatgtggatcgacatgaacgagccatccaacttcattagaggaagtgtggatggctgtccgaataatgagctggaaaaccctccttacgtaccaggcgttgttggtgggactcttcaagctgcgacgatttgcgcatcctcccatcagttcctgtcaacccactataacttgcacaatctgtacgggacaacagaggctatcgccagtcatagggccctggtaaaagctagaggaacacgccctttcgttatctctcgctcaacttttgcaggccacggtaggtatgccggacattggaccggcgacgtctggagttcttgggaacagctggcttcctccgttccagagatattgcagtttaacctgttgggagtcccacttgtaggtgcagatgtttgtggcttcctggggaacacctcagaagaattgtgcgtaagatggactcaactgggcgccttctacccttttatgcgcaatcacaactcactgacatctttgcctcaagaaccgtactcatttagtgagccagcacagcaggccatgaggaaggctcttggcctgagatatgcacttctgccgcatctgtacacccttttccaccaggctcatgtccatggagagactgttgcacgacctctgttcttggagttcccaaaagactcttccacgtggacagtcgatcaccagatgctgtggggcgaggctctgctgattacacctgtattgcaacctggtaaggccgaagttaccgggtactttccattggggacctggtatgatctgcaaacagtcccggttgaagctcttggaagtcttccacctccacctgctgcaccaagggagcctgcgatccactctgaaggacagtgggtaactttgcctgcaccgctggacaccatcaatgtccatctgcgcgaaggctacatcataccacttcaaggtcctggactgaccactacagagtctagaaaacaaccaatggctcttgctgttgcactgactaaaagcggcgaagcaaggggtgagctgttctgggacgacggagagtcactggaggtactcgaacgaggcgcgtatacgcaggtcatttttgaggctcgcaataatacgatcgttaacgagctggtccacgtcacttcagaaggtgcaggccttcagttgggcaaggtaactgtcctgggagttgctacagcaccgcagcaggtcttgtccaacggacggcccgtaagcaactttacctatagtcctgataccaaagttctggacatctgcgttgctctgctgatgggtgagcagttcctggtatcatggtgc

SEQ ID NO: 232 - protein, 944 aa, synthetic construct
  REGION 1..944: note = Variant of the Homo Sapiens Lysosomal alpha-glucosidase
MEWSWVFLFFLSVTTGVHSGHILRHDFSTVPRELSGSSQVLEETHPAHQVGASRPGPRDAQLHPGRPRAVPTQCDVPENSRFDCAPEKAITQEQCEARGCCYIPAKQGLQGAQMGQPWCFFPPSYPSYKLENLSQSEMGYTATLTRTTPSFFPKDILTLRLDVMMETENRLHFTIKDPANRRYEVPLETPHVHSRAPSPLYSVEFSEEPFGVIVRRQLDGRVLLNTTVAPLFFADQFLQLSTSLPSQYITGLAEHLSPLMLSTSWNKITLWNRDLAPTPGANLYGSHPFYLALEDGGSAHGVFLLNSNAMDVVLQPSPALSWRSTGGILDVYIFLGPEPKSVVQQYLDVVGYPFMPPYWGLGFHLCRWGYSSTAITRQVVENMTRAHFPLDVQWNDLDYMDSRRDFTFNKDGFRDFPAMVQELHQGGRRYMMIVDPGISSSGPAGSYRPYDEGLRRGVFITNETGQPLIGKVWPGSTAFPDFTNPEALAWWEDMVAEFHDQVPFDGMWIDMNEPSNFIRGSVDGCPNNELENPPYVPGVVGGTLQAATICASSHQFLSTHYNLHNLYGTTEAIASHRALVKARGTRPFVISRSTFAGHGRYAGHWTGDVWSSWEQLASSVPEILQFNLLGVPLVGADVCGFLGNTSEELCVRWTQLGAFYPFMRNHNSLTSLPQEPYSFSEPAQQAMRKALGLRYALLPHLYTLFHQAHVHGETVARPLFLEFPKDSSTWTVDHQMLWGEALLITPVLQPGKAEVTGYFPLGTWYDLQTVPVEALGSLPPPPAAPREPAIHSEGQWVTLPAPLDTINVHLREGYIIPLQGPGLTTTESRKQPMALAVALTKSGEARGELFWDDGESLEVLERGAYTQVIFEARNNTIVNELVHVTSEGAGLQLGKVTVLGVATAPQQVLSNGRPVSNFTYSPDTKVLDICVALLMGEQFLVSWC

SEQ ID NO: 233 - DNA, 2832 bp, synthetic construct
  misc_feature 1..2832: note = Variant of the Homo Sapiens Lysosomal alpha-glucosidase
  source 1..2832: mol_type = other DNA
atggaatggagctgggtctttctcttcttcctgtcagtaacgactggtgtccactccggacacattctgtggcatgatttttctaccgtgcctagagagctttccggttcaagtcaagtcctcgaagaaacacatccagcccatcaggttggcgcatctaggccgggccctcgggacgctcaactccacccagggagacctagggccgttcccactcagtgcgacgtgccagagaactcacgcttcgattgtgcacctgagaaggctatcacgcaagagcagtgcgaggcccgcggatgttgttacataccggctaaacaggggctgcagggtgcgcagatgggccaaccttggtgcttcttcccaccatcctatccgagttacaagctggagaatctctcccagtctgaaatgggatataccgcaacactgactcggaccaccccctccttctttcccaaagatatcttgactctgagacttgacgtaatgatggagacagaaaacaggctccactttaccattaaggaccctgccaatcgccgatacgaggtgcctctggaaacaccacacgtgcacagtagagctccatcacctctgtattctgtcgagttctccgaagagccgtttggcgttatcgtcaggaggcagctcgacgggcgagtgcttctgaacacgactgtggccccgttgttctttgcggatcagtttctgcaactgtcaacaagtctcccttctcagtacattaccgggcttgcagagcatctgtccccactcatgctgagtacttcatgggataaaatcacactgtggaatagagaccttgctcctactccaggagccaacttgtatggttctcaccctttctacttggccctggaagatggcggatcagcgcatggcgtattcctcctgaattccaacgcaatggacgttgttcttcagccatctcctgctttgagttggagatctacaggcgggatactggacgtctacatctttctgggtccagagcctaaatccgtagtgcagcagtatcttgatgtcgtcggatacccgtttatgccaccatattggggcctggggttccacttgtgccgctggggatattcatccaccgccattacacgacaagttgttgagaatatgaccagggcacattttcctctggatgtacagtggaacgacctggactacatggatagtcgccgcgacttcaccttcaataaggatgggttcagagactttcctgctatggtccaagaacttcaccagggaggcaggaggtacatgatgatcgtagatccgggaatttcttcttctggcccagccggttcatacagaccgtatgacgaaggactgcgacgaggcgtctttatcacgaacgagactggtcagcctttgataggcaaggtttggccagggtccaccgctttcccggatttcacaaatcctgaggcactggcctggtgggaagatatggtcgccgagtttcacgaccaggtcccatttgacgggatgtggatcgacatgaacgagccatccaacttcattagaggaagtgtggatggctgtccgaataatgagctggaaaaccctccttacgtaccaggcgttgttggtgggactcttcaagctgcgacgatttgcgcatcctcccatcagttcctgtcaacccactataacttgcacaatctgtacgggacaacagaggctatcgccagtcatagggccctggtaaaagctagaggaacacgccctttcgttatctctcgctcaacttttgcaggccacggtaggtatgccggacattggaccggcgacgtctggagttcttgggaacagctggcttcctccgttccagagatattgcagtttaacctgttgggagtcccacttgtaggtgcagatgtttgtggcttcctggggaacacctcagaagaattgtgcgtaagatggactcaactgggcgccttctacccttttatgcgcaatcacaactcactgacatctttgcctcaagaaccgtactcatttagtgagccagcacagcaggccatgaggaaggctcttggcctgagatatgcacttctgccgcatctgtacacccttttccaccaggctcatgtccatggagagactgttgcacgacctctgttcttggagttcccaaaagactcttccacgtggacagtcgatcaccagatgctgtggggcgaggctctgctgattacacctgtattgcaacctggtaaggccgaagttaccgggtactttccattggggacctggtatgatctgcaaacagtcccggttgaagctcttggaagtcttccacctccacctgctgcaccaagggagcctgcgatccactctgaaggacagtgggtaactttgcctgcaccgctggacaccatcaatgtccatctgcgcgaaggctacatcataccacttcaaggtcctggactgaccactacagagtctagaaaacaaccaatggctcttgctgttgcactgactaaaagcggcgaagcaaggggtgagctgttctgggacgacggagagtcactggaggtactcgaacgaggcgcgtatacgcaggtcatttttgaggctcgcaataatacgatcgttaacgagctggtccacgtcacttcagaaggtgcaggccttcagttgggcaaggtaactgtcctgggagttgctacagcaccgcagcaggtcttgtccaacggacggcccgtaagcaactttacctatagtcctgataccaaagttctggacatctgcgttgctctgctgatgggtgagcagttcctggtatcatggtgc

SEQ ID NO: 234 - protein, 944 aa, synthetic construct
  REGION 1..944: note = Variant of the Homo Sapiens Lysosomal alpha-glucosidase
MEWSWVFLFFLSVTTGVHSGHILWHDFSTVPRELSGSSQVLEETHPAHQVGASRPGPRDAQLHPGRPRAVPTQCDVPENSRFDCAPEKAITQEQCEARGCCYIPAKQGLQGAQMGQPWCFFPPSYPSYKLENLSQSEMGYTATLTRTTPSFFPKDILTLRLDVMMETENRLHFTIKDPANRRYEVPLETPHVHSRAPSPLYSVEFSEEPFGVIVRRQLDGRVLLNTTVAPLFFADQFLQLSTSLPSQYITGLAEHLSPLMLSTSWDKITLWNRDLAPTPGANLYGSHPFYLALEDGGSAHGVFLLNSNAMDVVLQPSPALSWRSTGGILDVYIFLGPEPKSVVQQYLDVVGYPFMPPYWGLGFHLCRWGYSSTAITRQVVENMTRAHFPLDVQWNDLDYMDSRRDFTFNKDGFRDFPAMVQELHQGGRRYMMIVDPGISSSGPAGSYRPYDEGLRRGVFITNETGQPLIGKVWPGSTAFPDFTNPEALAWWEDMVAEFHDQVPFDGMWIDMNEPSNFIRGSVDGCPNNELENPPYVPGVVGGTLQAATICASSHQFLSTHYNLHNLYGTTEAIASHRALVKARGTRPFVISRSTFAGHGRYAGHWTGDVWSSWEQLASSVPEILQFNLLGVPLVGADVCGFLGNTSEELCVRWTQLGAFYPFMRNHNSLTSLPQEPYSFSEPAQQAMRKALGLRYALLPHLYTLFHQAHVHGETVARPLFLEFPKDSSTWTVDHQMLWGEALLITPVLQPGKAEVTGYFPLGTWYDLQTVPVEALGSLPPPPAAPREPAIHSEGQWVTLPAPLDTINVHLREGYIIPLQGPGLTTTESRKQPMALAVALTKSGEARGELFWDDGESLEVLERGAYTQVIFEARNNTIVNELVHVTSEGAGLQLGKVTVLGVATAPQQVLSNGRPVSNFTYSPDTKVLDICVALLMGEQFLVSWC

SEQ ID NO: 235 - DNA, 2832 bp, synthetic construct
  misc_feature 1..2832: note = Variant of the Homo Sapiens Lysosomal alpha-glucosidase
  source 1..2832: mol_type = other DNA
atggaatggagctgggtctttctcttcttcctgtcagtaacgactggtgtccactccggacacattctgtggcatgatttttctaccgtgcctagagagctttccggttcaagtacggtcctcgaagaaacacatccagcccatcaggttggcgcatctaggccgggccctcgggacgctcaactccacccagggagacctagggccgttcccactcagtgcgacgtgccagagaactcacgcttcgattgtgcacctgagaaggctatcacgcaagagcagtgcgaggcccgcggatgttgttacataccggctaaacaggggctgcagggtgcgcagatgggccaaccttggtgcttcttcccaccatcctatccgagttacaagctggagaatctctcccagtctgaaatgggatataccgcaacactgactcggaccaccccctccttctttcccaaagatatcttgactctgagacttgacgtaatgatggagacagaaaacaggctccactttaccattaaggaccctgccaatcgccgatacgaggtgcctctggaaacaccacacgtgcacagtagagctccatcacctctgtattctgtcgagttctccgaagagccgtttggcgttatcgtcaggaggcagctcgacgggcgagtgcttctgaacacgactgtggccccgttgttctttgcggatcagtttctgcaactgtcaacaagtctcccttctcagtacattaccgggcttgcagagcatctgtccccactcatgctgagtacttcatggaacaaaatcacactgtggaatagagaccttgctcctactccaggagccaacttgtatggttctcaccctttctacttggccctggaagatggcggatcagcgcatggcgtattcctcctgaattccaacgcaatggacgttgttcttcagccatctcctgctttgagttggagatctacaggcgggatactggacgtctacatctttctgggtccagagcctaaatccgtagtgcagcagtatcttgatgtcgtcggatacccgtttatgccaccatattggggcctggggttccacttgtgccgctggggatattcatccaccgccattacacgacaagttgttgagaatatgaccagggcacattttcctctggatgtacagtggaacgacctggactacatggatagtcgccgcgacttcaccttcaataaggatgggttcagagactttcctgctatggtccaagaacttcaccagggaggcaggaggtacatgatgatcgtagatccgggaatttcttcttctggcccagccggttcatacagaccgtatgacgaaggactgcgacgaggcgtctttatcacgaacgagactggtcagcctttgataggcaaggtttggccagggtccaccgctttcccggatttcacaaatcctgaggcactggcctggtgggaagatatggtcgccgagtttcacgaccaggtcccatttgacgggatgtggatcgacatgaacgagccatccaacttcattagaggaagtgtggatggctgtccgaataatgagctggaaaaccctccttacgtaccaggcgttgttggtgggactcttcaagctgcgacgatttgcgcatcctcccatcagttcctgtcaacccactataacttgcacaatctgtacgggacaacagaggctatcgccagtcatagggccctggtaaaagctagaggaacacgccctttcgttatctctcgctcaacttttgcaggccacggtaggtatgccggacattggaccggcgacgtctggagttcttgggaacagctggcttcctccgttccagagatattgcagtttaacctgttgggagtcccacttgtaggtgcagatgtttgtggcttcctggggaacacctcagaagaattgtgcgtaagatggactcaactgggcgccttctacccttttatgcgcaatcacaactcactgacatctttgcctcaagaaccgtactcatttagtgagccagcacagcaggccatgaggaaggctcttggcctgagatatgcacttctgccgcatctgtacacccttttccaccaggctcatgtccatggagagactgttgcacgacctctgttcttggagttcccaaaagactcttccacgtggacagtcgatcaccagatgctgtggggcgaggctctgctgattacacctgtattgcaacctggtaaggccgaagttaccgggtactttccattggggacctggtatgatctgcaaacagtcccggttgaagctcttggaagtcttccacctccacctgctgcaccaagggagcctgcgatccactctgaaggacagtgggtaactttgcctgcaccgctggacaccatcaatgtccatctgcgcgaaggctacatcataccacttcaaggtcctggactgaccactacagagtctagaaaacaaccaatggctcttgctgttgcactgactaaaagcggcgaagcaaggggtgagctgttctgggacgacggagagtcactggaggtactcgaacgaggcgcgtatacgcaggtcatttttgaggctcgcaataatacgatcgttaacgagctggtccacgtcacttcagaaggtgcaggccttcagttgggcaaggtaactgtcctgggagttgctacagcaccgcagcaggtcttgtccaacggacggcccgtaagcaactttacctatagtcctgataccaaagttctggacatctgcgttgctctgctgatgggtgagcagttcctggtatcatggtgc

SEQ ID NO: 236 - protein, 944 aa, synthetic construct
  REGION 1..944: note = Variant of the Homo Sapiens Lysosomal alpha-glucosidase
MEWSWVFLFFLSVTTGVHSGHILWHDFSTVPRELSGSSTVLEETHPAHQVGASRPGPRDAQLHPGRPRAVPTQCDVPENSRFDCAPEKAITQEQCEARGCCYIPAKQGLQGAQMGQPWCFFPPSYPSYKLENLSQSEMGYTATLTRTTPSFFPKDILTLRLDVMMETENRLHFTIKDPANRRYEVPLETPHVHSRAPSPLYSVEFSEEPFGVIVRRQLDGRVLLNTTVAPLFFADQFLQLSTSLPSQYITGLAEHLSPLMLSTSWNKITLWNRDLAPTPGANLYGSHPFYLALEDGGSAHGVFLLNSNAMDVVLQPSPALSWRSTGGILDVYIFLGPEPKSVVQQYLDVVGYPFMPPYWGLGFHLCRWGYSSTAITRQVVENMTRAHFPLDVQWNDLDYMDSRRDFTFNKDGFRDFPAMVQELHQGGRRYMMIVDPGISSSGPAGSYRPYDEGLRRGVFITNETGQPLIGKVWPGSTAFPDFTNPEALAWWEDMVAEFHDQVPFDGMWIDMNEPSNFIRGSVDGCPNNELENPPYVPGVVGGTLQAATICASSHQFLSTHYNLHNLYGTTEAIASHRALVKARGTRPFVISRSTFAGHGRYAGHWTGDVWSSWEQLASSVPEILQFNLLGVPLVGADVCGFLGNTSEELCVRWTQLGAFYPFMRNHNSLTSLPQEPYSFSEPAQQAMRKALGLRYALLPHLYTLFHQAHVHGETVARPLFLEFPKDSSTWTVDHQMLWGEALLITPVLQPGKAEVTGYFPLGTWYDLQTVPVEALGSLPPPPAAPREPAIHSEGQWVTLPAPLDTINVHLREGYIIPLQGPGLTTTESRKQPMALAVALTKSGEARGELFWDDGESLEVLERGAYTQVIFEARNNTIVNELVHVTSEGAGLQLGKVTVLGVATAPQQVLSNGRPVSNFTYSPDTKVLDICVALLMGEQFLVSWC

SEQ ID NO: 237 - DNA, 2832 bp, synthetic construct
  misc_feature 1..2832: note = Variant of the Homo Sapiens Lysosomal alpha-glucosidase
  source 1..2832: mol_type = other DNA
atggaatggagctgggtctttctcttcttcctgtcagtaacgactggtgtccactccggacacattctgtggcatgatttttctaccgtgcctagagagctttccggttcaagtcaagtcctcgaagaaacacatccagcccatcagtgtggcgcatctaggccgggccctcgggacgctcaactccacccagggagacctagggccgttcccactcagtgcgacgtgccagagaactcacgcttcgattgtgcacctgagaaggctatcacgcaagagcagtgcgaggcccgcggatgttgttacataccggctaaacaggggctgcagggtgcgcagatgggccaaccttggtgcttcttcccaccatcctatccgagttacaagctggagaatctctcccagtctgaaatgggatataccgcaacactgactcggaccaccccctccttctttcccaaagatatcttgactctgagacttgacgtaatgatggagacagaaaacaggctccactttaccattaaggaccctgccaatcgccgatacgaggtgcctctggaaacaccacacgtgcacagtagagctccatcacctctgtattctgtcgagttctccgaagagccgtttggcgttatcgtcaggaggcagctcgacgggcgagtgcttctgaacacgactgtggccccgttgttctttgcggatcagtttctgcaactgtcaacaagtctcccttctcagtacattaccgggcttgcagagcatctgtccccactcatgctgagtacttcatggaacaaaatcacactgtggaatagagaccttgctcctactccaggagccaacttgtatggttctcaccctttctacttggccctggaagatggcggatcagcgcatggcgtattcctcctgaattccaacgcaatggacgttgttcttcagccatctcctgctttgagttggagatctacaggcgggatactggacgtctacatctttctgggtccagagcctaaatccgtagtgcagcagtatcttgatgtcgtcggatacccgtttatgccaccatattggggcctggggttccacttgtgccgctggggatattcatccaccgccattacacgacaagttgttgagaatatgaccagggcacattttcctctggatgtacagtggaacgacctggactacatggatagtcgccgcgacttcaccttcaataaggatgggttcagagactttcctgctatggtccaagaacttcaccagggaggcaggaggtacatgatgatcgtagatccgggaatttcttcttctggcccagccggttcatacagaccgtatgacgaaggactgcgacgaggcgtctttatcacgaacgagactggtcagcctttgataggcaaggtttggccagggtccaccgctttcccggatttcacaaatcctgaggcactggcctggtgggaagatatggtcgccgagtttcacgaccaggtcccatttgacgggatgtggatcgacatgaacgagccatccaacttcattagaggaagtgtggatggctgtccgaataatgagctggaaaaccctccttacgtaccaggcgttgttggtgggactcttcaagctgcgacgatttgcgcatcctcccatcagttcctgtcaacccactataacttgcacaatctgtacgggacaacagaggctatcgccagtcatagggccctggtaaaagctagaggaacacgccctttcgttatctctcgctcaacttttgcaggccacggtaggtatgccggacattggaccggcgacgtctggagttcttgggaacagctggcttcctccgttccagagatattgcagtttaacctgttgggagtcccacttgtaggtgcagatgtttgtggcttcctggggaacacctcagaagaattgtgcgtaagatggactcaactgggcgccttctacccttttatgcgcaatcacaactcactgacatctttgcctcaagaaccgtactcatttagtgagccagcacagcaggccatgaggaaggctcttggcctgagatatgcacttctgccgcatctgtacacccttttccaccaggctcatgtccatggagagactgttgcacgacctctgttcttggagttcccaaaagactcttccacgtggacagtcgatcaccagatgctgtggggcgaggctctgctgattacacctgtattgcaacctggtaaggccgaagttaccgggtactttccattggggacctggtatgatctgcaaacagtcccggttgaagctcttggaagtcttccacctccacctgctgcaccaagggagcctgcgatccactctgaaggacagtgggtaactttgcctgcaccgctggacaccatcaatgtccatctgcgcgaaggctacatcataccacttcaaggtcctggactgaccactacagagtctagaaaacaaccaatggctcttgctgttgcactgactaaaagcggcgaagcaaggggtgagctgttctgggacgacggagagtcactggaggtactcgaacgaggcgcgtatacgcaggtcatttttgaggctcgcaataatacgatcgttaacgagctggtccacgtcacttcagaaggtgcaggccttcagttgggcaaggtaactgtcctgggagttgctacagcaccgcagcaggtcttgtccaacggacggcccgtaagcaactttacctatagtcctgataccaaagttctggacatctgcgttgctctgctgatgggtgagcagttcctggtatcatggtgc

SEQ ID NO: 238 - protein, 944 aa, synthetic construct
  REGION 1..944: note = Variant of the Homo Sapiens Lysosomal alpha-glucosidase
MEWSWVFLFFLSVTTGVHSGHILWHDFSTVPRELSGSSQVLEETHPAHQCGASRPGPRDAQLHPGRPRAVPTQCDVPENSRFDCAPEKAITQEQCEARGCCYIPAKQGLQGAQMGQPWCFFPPSYPSYKLENLSQSEMGYTATLTRTTPSFFPKDILTLRLDVMMETENRLHFTIKDPANRRYEVPLETPHVHSRAPSPLYSVEFSEEPFGVIVRRQLDGRVLLNTTVAPLFFADQFLQLSTSLPSQYITGLAEHLSPLMLSTSWNKITLWNRDLAPTPGANLYGSHPFYLALEDGGSAHGVFLLNSNAMDVVLQPSPALSWRSTGGILDVYIFLGPEPKSVVQQYLDVVGYPFMPPYWGLGFHLCRWGYSSTAITRQVVENMTRAHFPLDVQWNDLDYMDSRRDFTFNKDGFRDFPAMVQELHQGGRRYMMIVDPGISSSGPAGSYRPYDEGLRRGVFITNETGQPLIGKVWPGSTAFPDFTNPEALAWWEDMVAEFHDQVPFDGMWIDMNEPSNFIRGSVDGCPNNELENPPYVPGVVGGTLQAATICASSHQFLSTHYNLHNLYGTTEAIASHRALVKARGTRPFVISRSTFAGHGRYAGHWTGDVWSSWEQLASSVPEILQFNLLGVPLVGADVCGFLGNTSEELCVRWTQLGAFYPFMRNHNSLTSLPQEPYSFSEPAQQAMRKALGLRYALLPHLYTLFHQAHVHGETVARPLFLEFPKDSSTWTVDHQMLWGEALLITPVLQPGKAEVTGYFPLGTWYDLQTVPVEALGSLPPPPAAPREPAIHSEGQWVTLPAPLDTINVHLREGYIIPLQGPGLTTTESRKQPMALAVALTKSGEARGELFWDDGESLEVLERGAYTQVIFEARNNTIVNELVHVTSEGAGLQLGKVTVLGVATAPQQVLSNGRPVSNFTYSPDTKVLDICVALLMGEQFLVSWC

SEQ ID NO: 239 - DNA, 2832 bp, synthetic construct
  misc_feature 1..2832: note = Variant of the Homo Sapiens Lysosomal alpha-glucosidase
  source 1..2832: mol_type = other DNA
atggaatggagctgggtctttctcttcttcctgtcagtaacgactggtgtccactccggacacattctggcgcatgatttttctaccgtgcctagagagctttccggttcaagtcaagtcctcgaagaaacacatccagcccatcaggttggcgcatctaggccgggccctcgggacgctcaactccacccagggagacctagggccgttcccactcagtgcgacgtgccagagaactcacgcttcgattgtgcacctgagaaggctatcacgcaagagcagtgcgaggcccgcggatgttgttacataccggctaaacaggggctgcagggtgcgcagatgggccaaccttggtgcttcttcccaccatcctatccgagttacaagctggagaatctctcccagtctgaaatgggatataccgcaacactgactcggaccaccccctccttctttcccaaagatatcttgactctgagacttgacgtaatgatggagacagaaaacaggctccactttaccattaaggaccctgccaatcgccgatacgaggtgcctctggaaacaccacacgtgcacagtagagctccatcacctctgtattctgtcgagttctccgaagagccgtttggcgttatcgtcaggaggcagctcgacgggcgagtgcttctgaacacgactgtggccccgttgttctttgcggatcagtttctgcaactgtcaacaagtctcccttctcagtacattaccgggcttgcagagcatctgtccccactcatgctgagtacttcatggaacaaaatcacactgtggaatagagaccttgctcctactccaggagccaacttgtatggttctcaccctttctacttggccctggaagatggcggatcagcgcatggcgtattcctcctgaattccaacgcaatggacgttgttcttcagccatctcctgctttgagttggagatctacaggcgggatactggacgtctacatctttctgggtccagagcctaaatccgtagtgcagcagtatcttgatgtcgtcggatacccgtttatgccaccatattggggcctggggttccacttgtgccgctggggatattcatccaccgccattacacgacaagttgttgagaatatgaccagggcacattttcctctggatgtacagtggaacgacctggactacatggatagtcgccgcgacttcaccttcaataaggatgggttcagagactttcctgctatggtccaagaacttcaccagggaggcaggaggtacatgatgatcgtagatccgggaatttcttcttctggcccagccggttcatacagaccgtatgacgaaggactgcgacgaggcgtctttatcacgaacgagactggtcagcctttgataggcaaggtttggccagggtccaccgctttcccggatttcacaaatcctgaggcactggcctggtgggaagatatggtcgccgagtttcacgaccaggtcccatttgacgggatgtggatcgacatgaacgagccatccaacttcattagaggaagtgtggatggctgtccgaataatgagctggaaaaccctccttacgtaccaggcgttgttggtgggactcttcaagctgcgacgatttgcgcatcctcccatcagttcctgtcaacccactataacttgcacaatctgtacgggacaacagaggctatcgccagtcatagggccctggtaaaagctagaggaacacgccctttcgttatctctcgctcaacttttgcaggccacggtaggtatgccggacattggaccggcgacgtctggagttcttgggaacagctggcttcctccgttccagagatattgcagtttaacctgttgggagtcccacttgtaggtgcagatgtttgtggcttcctggggaacacctcagaagaattgtgcgtaagatggactcaactgggcgccttctacccttttatgcgcaatcacaactcactgacatctttgcctcaagaaccgtactcatttagtgagccagcacagcaggccatgaggaaggctcttggcctgagatatgcacttctgccgcatctgtacacccttttccaccaggctcatgtccatggagagactgttgcacgacctctgttcttggagttcccaaaagactcttccacgtggacagtcgatcaccagatgctgtggggcgaggctctgctgattacacctgtattgcaacctggtaaggccgaagttaccgggtactttccattggggacctggtatgatctgcaaacagtcccggttgaagctcttggaagtcttccacctccacctgctgcaccaagggagcctgcgatccactctgaaggacagtgggtaactttgcctgcaccgctggacaccatcaatgtccatctgcgcgaaggctacatcataccacttcaaggtcctggactgaccactacagagtctagaaaacaaccaatggctcttgctgttgcactgactaaaagcggcgaagcaaggggtgagctgttctgggacgacggagagtcactggaggtactcgaacgaggcgcgtatacgcaggtcatttttgaggctcgcaataatacgatcgttaacgagctggtccacgtcacttcagaaggtgcaggccttcagttgggcaaggtaactgtcctgggagttgctacagcaccgcagcaggtcttgtccaacggacggcccgtaagcaactttacctatagtcctgataccaaagttctggacatctgcgttgctctgctgatgggtgagcagttcctggtatcatggtgc

SEQ ID NO: 240 - protein, 944 aa, synthetic construct
  REGION 1..944: note = Variant of the Homo Sapiens Lysosomal alpha-glucosidase
MEWSWVFLFFLSVTTGVHSGHILAHDFSTVPRELSGSSQVLEETHPAHQVGASRPGPRDAQLHPGRPRAVPTQCDVPENSRFDCAPEKAITQEQCEARGCCYIPAKQGLQGAQMGQPWCFFPPSYPSYKLENLSQSEMGYTATLTRTTPSFFPKDILTLRLDVMMETENRLHFTIKDPANRRYEVPLETPHVHSRAPSPLYSVEFSEEPFGVIVRRQLDGRVLLNTTVAPLFFADQFLQLSTSLPSQYITGLAEHLSPLMLSTSWNKITLWNRDLAPTPGANLYGSHPFYLALEDGGSAHGVFLLNSNAMDVVLQPSPALSWRSTGGILDVYIFLGPEPKSVVQQYLDVVGYPFMPPYWGLGFHLCRWGYSSTAITRQVVENMTRAHFPLDVQWNDLDYMDSRRDFTFNKDGFRDFPAMVQELHQGGRRYMMIVDPGISSSGPAGSYRPYDEGLRRGVFITNETGQPLIGKVWPGSTAFPDFTNPEALAWWEDMVAEFHDQVPFDGMWIDMNEPSNFIRGSVDGCPNNELENPPYVPGVVGGTLQAATICASSHQFLSTHYNLHNLYGTTEAIASHRALVKARGTRPFVISRSTFAGHGRYAGHWTGDVWSSWEQLASSVPEILQFNLLGVPLVGADVCGFLGNTSEELCVRWTQLGAFYPFMRNHNSLTSLPQEPYSFSEPAQQAMRKALGLRYALLPHLYTLFHQAHVHGETVARPLFLEFPKDSSTWTVDHQMLWGEALLITPVLQPGKAEVTGYFPLGTWYDLQTVPVEALGSLPPPPAAPREPAIHSEGQWVTLPAPLDTINVHLREGYIIPLQGPGLTTTESRKQPMALAVALTKSGEARGELFWDDGESLEVLERGAYTQVIFEARNNTIVNELVHVTSEGAGLQLGKVTVLGVATAPQQVLSNGRPVSNFTYSPDTKVLDICVALLMGEQFLVSWC

SEQ ID NO: 241 - DNA, 2832 bp, synthetic construct
  misc_feature 1..2832: note = Variant of the Homo Sapiens Lysosomal alpha-glucosidase
  source 1..2832: mol_type = other DNA
atggaatggagctgggtctttctcttcttcctgtcagtaacgactggtgtccactccggacacattctgtggcatgatttttctaccgtgcctagagagctttccggttcaagtcaagtcctcgaagaaacacatccagcccatcaggttggcgcatctaggccgggccctcgggacgctcaactccacccagggagacctagggccgttcccactcagtgcgacgtgccagagaactcacgcttcgattgtgcacctaagaaggctatcacgcaagagcagtgcgaggcccgcggatgttgttacataccggctaaacaggggctgcagggtgcgcagatgggccaaccttggtgcttcttcccaccatcctatccgagttacaagctggagaatctctcccagtctgaaatgggatataccgcaacactgactcggaccaccccctccttctttcccaaagatatcttgactctgagacttgacgtaatgatggagacagaaaacaggctccactttaccattaaggaccctgccaatcgccgatacgaggtgcctctggaaacaccacacgtgcacagtagagctccatcacctctgtattctgtcgagttctccgaagagccgtttggcgttatcgtcaggaggcagctcgacgggcgagtgcttctgaacacgactgtggccccgttgttctttgcggatcagtttctgcaactgtcaacaagtctcccttctcagtacattaccgggcttgcagagcatctgtccccactcatgctgagtacttcatggaacaaaatcacactgtggaatagagaccttgctcctactccaggagccaacttgtatggttctcaccctttctacttggccctggaagatggcggatcagcgcatggcgtattcctcctgaattccaacgcaatggacgttgttcttcagccatctcctgctttgagttggagatctacaggcgggatactggacgtctacatctttctgggtccagagcctaaatccgtagtgcagcagtatcttgatgtcgtcggatacccgtttatgccaccatattggggcctggggttccacttgtgccgctggggatattcatccaccgccattacacgacaagttgttgagaatatgaccagggcacattttcctctggatgtacagtggaacgacctggactacatggatagtcgccgcgacttcaccttcaataaggatgggttcagagactttcctgctatggtccaagaacttcaccagggaggcaggaggtacatgatgatcgtagatccgggaatttcttcttctggcccagccggttcatacagaccgtatgacgaaggactgcgacgaggcgtctttatcacgaacgagactggtcagcctttgataggcaaggtttggccagggtccaccgctttcccggatttcacaaatcctgaggcactggcctggtgggaagatatggtcgccgagtttcacgaccaggtcccatttgacgggatgtggatcgacatgaacgagccatccaacttcattagaggaagtgtggatggctgtccgaataatgagctggaaaaccctccttacgtaccaggcgttgttggtgggactcttcaagctgcgacgatttgcgcatcctcccatcagttcctgtcaacccactataacttgcacaatctgtacgggacaacagaggctatcgccagtcatagggccctggtaaaagctagaggaacacgccctttcgttatctctcgctcaacttttgcaggccacggtaggtatgccggacattggaccggcgacgtctggagttcttgggaacagctggcttcctccgttccagagatattgcagtttaacctgttgggagtcccacttgtaggtgcagatgtttgtggcttcctggggaacacctcagaagaattgtgcgtaagatggactcaactgggcgccttctacccttttatgcgcaatcacaactcactgacatctttgcctcaagaaccgtactcatttagtgagccagcacagcaggccatgaggaaggctcttggcctgagatatgcacttctgccgcatctgtacacccttttccaccaggctcatgtccatggagagactgttgcacgacctctgttcttggagttcccaaaagactcttccacgtggacagtcgatcaccagatgctgtggggcgaggctctgctgattacacctgtattgcaacctggtaaggccgaagttaccgggtactttccattggggacctggtatgatctgcaaacagtcccggttgaagctcttggaagtcttccacctccacctgctgcaccaagggagcctgcgatccactctgaaggacagtgggtaactttgcctgcaccgctggacaccatcaatgtccatctgcgcgaaggctacatcataccacttcaaggtcctggactgaccactacagagtctagaaaacaaccaatggctcttgctgttgcactgactaaaagcggcgaagcaaggggtgagctgttctgggacgacggagagtcactggaggtactcgaacgaggcgcgtatacgcaggtcatttttgaggctcgcaataatacgatcgttaacgagctggtccacgtcacttcagaaggtgcaggccttcagttgggcaaggtaactgtcctgggagttgctacagcaccgcagcaggtcttgtccaacggacggcccgtaagcaactttacctatagtcctgataccaaagttctggacatctgcgttgctctgctgatgggtgagcagttcctggtatcatggtgc

SEQ ID NO: 242 - protein, 944 aa, synthetic construct
  REGION 1..944: note = Variant of the Homo Sapiens Lysosomal alpha-glucosidase
MEWSWVFLFFLSVTTGVHSGHILWHDFSTVPRELSGSSQVLEETHPAHQVGASRPGPRDAQLHPGRPRAVPTQCDVPENSRFDCAPKKAITQEQCEARGCCYIPAKQGLQGAQMGQPWCFFPPSYPSYKLENLSQSEMGYTATLTRTTPSFFPKDILTLRLDVMMETENRLHFTIKDPANRRYEVPLETPHVHSRAPSPLYSVEFSEEPFGVIVRRQLDGRVLLNTTVAPLFFADQFLQLSTSLPSQYITGLAEHLSPLMLSTSWNKITLWNRDLAPTPGANLYGSHPFYLALEDGGSAHGVFLLNSNAMDVVLQPSPALSWRSTGGILDVYIFLGPEPKSVVQQYLDVVGYPFMPPYWGLGFHLCRWGYSSTAITRQVVENMTRAHFPLDVQWNDLDYMDSRRDFTFNKDGFRDFPAMVQELHQGGRRYMMIVDPGISSSGPAGSYRPYDEGLRRGVFITNETGQPLIGKVWPGSTAFPDFTNPEALAWWEDMVAEFHDQVPFDGMWIDMNEPSNFIRGSVDGCPNNELENPPYVPGVVGGTLQAATICASSHQFLSTHYNLHNLYGTTEAIASHRALVKARGTRPFVISRSTFAGHGRYAGHWTGDVWSSWEQLASSVPEILQFNLLGVPLVGADVCGFLGNTSEELCVRWTQLGAFYPFMRNHNSLTSLPQEPYSFSEPAQQAMRKALGLRYALLPHLYTLFHQAHVHGETVARPLFLEFPKDSSTWTVDHQMLWGEALLITPVLQPGKAEVTGYFPLGTWYDLQTVPVEALGSLPPPPAAPREPAIHSEGQWVTLPAPLDTINVHLREGYIIPLQGPGLTTTESRKQPMALAVALTKSGEARGELFWDDGESLEVLERGAYTQVIFEARNNTIVNELVHVTSEGAGLQLGKVTVLGVATAPQQVLSNGRPVSNFTYSPDTKVLDICVALLMGEQFLVSWC

SEQ ID NO: 243 - DNA, 2832 bp, synthetic construct
  misc_feature 1..2832: note = Variant of the Homo Sapiens Lysosomal alpha-glucosidase
  source 1..2832: mol_type = other DNA
atggaatggagctgggtctttctcttcttcctgtcagtaacgactggtgtccactccggacacattctgtggcatgatttttctaccgtgcctagagagctttccggttcaagtcaagtcctcgaagaaacacatccagcccatcaggttggcgcatctaggccgggccctcgggacgctcaactccacccagggagacctagggccgttcccactcagtgcgacgtgccagagaactcacgcttcgattgtgcacctgagaaggctatcacgcaagagcagtgcgaggcccgcggatgttgttacataccggctaaacaggggctgcagggtgcgcagatgggccaaccttggtgcttcttcccaccatcctatccgagttacaagctggagaatctctcccagtctgaaatgggatataccgcaacactgactcggaccaccccctccttctttcccaaagatatcttgactctgagacttgacgtaatgatggagacagaaaacaggctccactttaccattaaggaccctgccaatcgccgatacgaggtgcctctggaaacaccacacgtgcacagtagagctccatcacctctgtattctgtcgagttctccgaagagccgtttggcgttatcgtcaggaggcagctcgacgggcgagtgcttctgaacacgactgtggccccgttgttctttgcggatcagtttctgcaactgtcaacaagtctcccttctcagtacattaccgggcttgcagagcatctgtccccactcatgctgagtacttcatggaacaaaatcacactgtggaatagagaccttgctcctactccaggagccaacttgtatggttctcaccctttctacttggccctggaagatggcggatcagcgcatggcgtattcctcctgaattccaacgcaatggacgttgttcttcagccatctcctgctttgagttggagatctacaggcgggatactggacgtctacatctttctgggtccagagcctaaatccgtagtgcagcagtatcttgatgtcgtcggatacccgtttatgccaccatattggggcctggggttccacttgtgccgctggggatattcatccaccgccattacacgacaagttgttgagaatatgaccagggcacattttcctctggatgtacagtggaacgacctggactacatggatagtcgccgcgacttcaccttcaataaggatgggttcagagactttcctgctatggtccaagaacttcaccagggaggcaggaggtacatgatgatcgtagatccgggaatttcttcttctggcccagccggttcatacagaccgtatgacgaaggactgcgacgaggcgtctttatcacgaacgagactggtcagcctttgataggcaaggtttggccagggtccaccgctttcccggatttcacaaatcctgaggcactggcctggtgggaagatatggtcgccgagtttcacgaccaggtcccatttgacgggatgtggatcgacatgaacgagccatccaacttcattagaggaagtgtggatggctgtccgaataatgagctggaaaaccctccttacgtaccaggcgttgttggtgggactcttcaagctgcgacgatttgcgcatcctcccatcagttcctgtcaacccactataacttgcacaatctgtacgggacaacagaggctatcgccagtcatagggccctggtaaaagctagaggaacacgccctttcgttatctctcgctcaacttttgcaggccacggtaggtatgccggacattggaccggcgacgtctggagttcttgggaacagctggcttcctccgttccagagatattgcagtttaacctgttgggagtcccacttgtaggtgcagatgtttgtggcttcctggggaacacctcagaagaattgtgcgtaagatggactcaactgggcgccttctacccttttatgcgcaatcacaactcactgacatctttgcctcaagaaccgtactcatttagtgagccagcacagcaggccatgaggaaggctcttggcctgagatatgcacttctgccgcatctgtacacccttttccaccaggctcatgtccatggagagactgttgcacgacctctgttcttggagttcccaaaagactcttccacgtggacagtcgatcaccagatgctgtggggcgaggctctgctgattacacctgtattgcaagctggtaaggccgaagttaccgggtactttccattggggacctggtatgatctgcaaacagtcccggttgaagctcttggaagtcttccacctccacctgctgcaccaagggagcctgcgatccactctgaaggacagtgggtaactttgcctgcaccgctggacaccatcaatgtccatctgcgcgaaggctacatcataccacttcaaggtcctggactgaccactacagagtctagaaaacaaccaatggctcttgctgttgcactgactaaaagcggcgaagcaaggggtgagctgttctgggacgacggagagtcactggaggtactcgaacgaggcgcgtatacgcaggtcatttttgaggctcgcaataatacgatcgttaacgagctggtccacgtcacttcagaaggtgcaggccttcagttgggcaaggtaactgtcctgggagttgctacagcaccgcagcaggtcttgtccaacggacggcccgtaagcaactttacctatagtcctgataccaaagttctggacatctgcgttgctctgctgatgggtgagcagttcctggtatcatggtgc

SEQ ID NO: 244 - protein, 944 aa, synthetic construct
  REGION 1..944: note = Variant of the Homo Sapiens Lysosomal alpha-glucosidase
MEWSWVFLFFLSVTTGVHSGHILWHDFSTVPRELSGSSQVLEETHPAHQVGASRPGPRDAQLHPGRPRAVPTQCDVPENSRFDCAPEKAITQEQCEARGCCYIPAKQGLQGAQMGQPWCFFPPSYPSYKLENLSQSEMGYTATLTRTTPSFFPKDILTLRLDVMMETENRLHFTIKDPANRRYEVPLETPHVHSRAPSPLYSVEFSEEPFGVIVRRQLDGRVLLNTTVAPLFFADQFLQLSTSLPSQYITGLAEHLSPLMLSTSWNKITLWNRDLAPTPGANLYGSHPFYLALEDGGSAHGVFLLNSNAMDVVLQPSPALSWRSTGGILDVYIFLGPEPKSVVQQYLDVVGYPFMPPYWGLGFHLCRWGYSSTAITRQVVENMTRAHFPLDVQWNDLDYMDSRRDFTFNKDGFRDFPAMVQELHQGGRRYMMIVDPGISSSGPAGSYRPYDEGLRRGVFITNETGQPLIGKVWPGSTAFPDFTNPEALAWWEDMVAEFHDQVPFDGMWIDMNEPSNFIRGSVDGCPNNELENPPYVPGVVGGTLQAATICASSHQFLSTHYNLHNLYGTTEAIASHRALVKARGTRPFVISRSTFAGHGRYAGHWTGDVWSSWEQLASSVPEILQFNLLGVPLVGADVCGFLGNTSEELCVRWTQLGAFYPFMRNHNSLTSLPQEPYSFSEPAQQAMRKALGLRYALLPHLYTLFHQAHVHGETVARPLFLEFPKDSSTWTVDHQMLWGEALLITPVLQAGKAEVTGYFPLGTWYDLQTVPVEALGSLPPPPAAPREPAIHSEGQWVTLPAPLDTINVHLREGYIIPLQGPGLTTTESRKQPMALAVALTKSGEARGELFWDDGESLEVLERGAYTQVIFEARNNTIVNELVHVTSEGAGLQLGKVTVLGVATAPQQVLSNGRPVSNFTYSPDTKVLDICVALLMGEQFLVSWC

SEQ ID NO: 245 - DNA, 2832 bp, synthetic construct
  misc_feature 1..2832: note = Variant of the Homo Sapiens Lysosomal alpha-glucosidase
  source 1..2832: mol_type = other DNA
atggaatggagctgggtctttctcttcttcctgtcagtaacgactggtgtccactccggacacattctgtggcatgatttttctgaggtgcctagagagctttccggttcaagtcaagtcctcgaagaaacacatccagcccatcaggttggcgcatctaggccgggccctcgggacgctcaactccacccagggagacctagggccgttcccactcagtgcgacgtgccagagaactcacgcttcgattgtgcacctgagaaggctatcacgcaagagcagtgcgaggcccgcggatgttgttacataccggctaaacaggggctgcagggtgcgcagatgggccaaccttggtgcttcttcccaccatcctatccgagttacaagctggagaatctctcccagtctgaaatgggatataccgcaacactgactcggaccaccccctccttctttcccaaagatatcttgactctgagacttgacgtaatgatggagacagaaaacaggctccactttaccattaaggaccctgccaatcgccgatacgaggtgcctctggaaacaccacacgtgcacagtagagctccatcacctctgtattctgtcgagttctccgaagagccgtttggcgttatcgtcaggaggcagctcgacgggcgagtgcttctgaacacgactgtggccccgttgttctttgcggatcagtttctgcaactgtcaacaagtctcccttctcagtacattaccgggcttgcagagcatctgtccccactcatgctgagtacttcatggaacaaaatcacactgtggaatagagaccttgctcctactccaggagccaacttgtatggttctcaccctttctacttggccctggaagatggcggatcagcgcatggcgtattcctcctgaattccaacgcaatggacgttgttcttcagccatctcctgctttgagttggagatctacaggcgggatactggacgtctacatctttctgggtccagagcctaaatccgtagtgcagcagtatcttgatgtcgtcggatacccgtttatgccaccatattggggcctggggttccacttgtgccgctggggatattcatccaccgccattacacgacaagttgttgagaatatgaccagggcacattttcctctggatgtacagtggaacgacctggactacatggatagtcgccgcgacttcaccttcaataaggatgggttcagagactttcctgctatggtccaagaacttcaccagggaggcaggaggtacatgatgatcgtagatccgggaatttcttcttctggcccagccggttcatacagaccgtatgacgaaggactgcgacgaggcgtctttatcacgaacgagactggtcagcctttgataggcaaggtttggccagggtccaccgctttcccggatttcacaaatcctgaggcactggcctggtgggaagatatggtcgccgagtttcacgaccaggtcccatttgacgggatgtggatcgacatgaacgagccatccaacttcattagaggaagtgtggatggctgtccgaataatgagctggaaaaccctccttacgtaccaggcgttgttggtgggactcttcaagctgcgacgatttgcgcatcctcccatcagttcctgtcaacccactataacttgcacaatctgtacgggacaacagaggctatcgccagtcatagggccctggtaaaagctagaggaacacgccctttcgttatctctcgctcaacttttgcaggccacggtaggtatgccggacattggaccggcgacgtctggagttcttgggaacagctggcttcctccgttccagagatattgcagtttaacctgttgggagtcccacttgtaggtgcagatgtttgtggcttcctggggaacacctcagaagaattgtgcgtaagatggactcaactgggcgccttctacccttttatgcgcaatcacaactcactgacatctttgcctcaagaaccgtactcatttagtgagccagcacagcaggccatgaggaaggctcttggcctgagatatgcacttctgccgcatctgtacacccttttccaccaggctcatgtccatggagagactgttgcacgacctctgttcttggagttcccaaaagactcttccacgtggacagtcgatcaccagatgctgtggggcgaggctctgctgattacacctgtattgcaacctggtaaggccgaagttaccgggtactttccattggggacctggtatgatctgcaaacagtcccggttgaagctcttggaagtcttccacctccacctgctgcaccaagggagcctgcgatccactctgaaggacagtgggtaactttgcctgcaccgctggacaccatcaatgtccatctgcgcgaaggctacatcataccacttcaaggtcctggactgaccactacagagtctagaaaacaaccaatggctcttgctgttgcactgactaaaagcggcgaagcaaggggtgagctgttctgggacgacggagagtcactggaggtactcgaacgaggcgcgtatacgcaggtcatttttgaggctcgcaataatacgatcgttaacgagctggtccacgtcacttcagaaggtgcaggccttcagttgggcaaggtaactgtcctgggagttgctacagcaccgcagcaggtcttgtccaacggacggcccgtaagcaactttacctatagtcctgataccaaagttctggacatctgcgttgctctgctgatgggtgagcagttcctggtatcatggtgc

SEQ ID NO: 246 - protein, 944 aa, synthetic construct
  REGION 1..944: note = Variant of the Homo Sapiens Lysosomal alpha-glucosidase
MEWSWVFLFFLSVTTGVHSGHILWHDFSEVPRELSGSSQVLEETHPAHQVGASRPGPRDAQLHPGRPRAVPTQCDVPENSRFDCAPEKAITQEQCEARGCCYIPAKQGLQGAQMGQPWCFFPPSYPSYKLENLSQSEMGYTATLTRTTPSFFPKDILTLRLDVMMETENRLHFTIKDPANRRYEVPLETPHVHSRAPSPLYSVEFSEEPFGVIVRRQLDGRVLLNTTVAPLFFADQFLQLSTSLPSQYITGLAEHLSPLMLSTSWNKITLWNRDLAPTPGANLYGSHPFYLALEDGGSAHGVFLLNSNAMDVVLQPSPALSWRSTGGILDVYIFLGPEPKSVVQQYLDVVGYPFMPPYWGLGFHLCRWGYSSTAITRQVVENMTRAHFPLDVQWNDLDYMDSRRDFTFNKDGFRDFPAMVQELHQGGRRYMMIVDPGISSSGPAGSYRPYDEGLRRGVFITNETGQPLIGKVWPGSTAFPDFTNPEALAWWEDMVAEFHDQVPFDGMWIDMNEPSNFIRGSVDGCPNNELENPPYVPGVVGGTLQAATICASSHQFLSTHYNLHNLYGTTEAIASHRALVKARGTRPFVISRSTFAGHGRYAGHWTGDVWSSWEQLASSVPEILQFNLLGVPLVGADVCGFLGNTSEELCVRWTQLGAFYPFMRNHNSLTSLPQEPYSFSEPAQQAMRKALGLRYALLPHLYTLFHQAHVHGETVARPLFLEFPKDSSTWTVDHQMLWGEALLITPVLQPGKAEVTGYFPLGTWYDLQTVPVEALGSLPPPPAAPREPAIHSEGQWVTLPAPLDTINVHLREGYIIPLQGPGLTTTESRKQPMALAVALTKSGEARGELFWDDGESLEVLERGAYTQVIFEARNNTIVNELVHVTSEGAGLQLGKVTVLGVATAPQQVLSNGRPVSNFTYSPDTKVLDICVALLMGEQFLVSWC

SEQ ID NO: 247 - DNA, 2832 bp, synthetic construct
  misc_feature 1..2832: note = Variant of the Homo Sapiens Lysosomal alpha-glucosidase
  source 1..2832: mol_type = other DNA
atggaatggagctgggtctttctcttcttcctgtcagtaacgactggtgtccactccggacacattctgtggcatgatttttctaccgtgcctagagagctttccggttcaagtcaagtcctcgaagaaacacatccagcccatcaggttggcgcatctaggccgggccctcgggacgctcaactccacccagggagacctagggccgttcccactcagtgcgacgtgccattgaactcacgcttcgattgtgcacctgagaaggctatcacgcaagagcagtgcgaggcccgcggatgttgttacataccggctaaacaggggctgcagggtgcgcagatgggccaaccttggtgcttcttcccaccatcctatccgagttacaagctggagaatctctcccagtctgaaatgggatataccgcaacactgactcggaccaccccctccttctttcccaaagatatcttgactctgagacttgacgtaatgatggagacagaaaacaggctccactttaccattaaggaccctgccaatcgccgatacgaggtgcctctggaaacaccacacgtgcacagtagagctccatcacctctgtattctgtcgagttctccgaagagccgtttggcgttatcgtcaggaggcagctcgacgggcgagtgcttctgaacacgactgtggccccgttgttctttgcggatcagtttctgcaactgtcaacaagtctcccttctcagtacattaccgggcttgcagagcatctgtccccactcatgctgagtacttcatggaacaaaatcacactgtggaatagagaccttgctcctactccaggagccaacttgtatggttctcaccctttctacttggccctggaagatggcggatcagcgcatggcgtattcctcctgaattccaacgcaatggacgttgttcttcagccatctcctgctttgagttggagatctacaggcgggatactggacgtctacatctttctgggtccagagcctaaatccgtagtgcagcagtatcttgatgtcgtcggatacccgtttatgccaccatattggggcctggggttccacttgtgccgctggggatattcatccaccgccattacacgacaagttgttgagaatatgaccagggcacattttcctctggatgtacagtggaacgacctggactacatggatagtcgccgcgacttcaccttcaataaggatgggttcagagactttcctgctatggtccaagaacttcaccagggaggcaggaggtacatgatgatcgtagatccgggaatttcttcttctggcccagccggttcatacagaccgtatgacgaaggactgcgacgaggcgtctttatcacgaacgagactggtcagcctttgataggcaaggtttggccagggtccaccgctttcccggatttcacaaatcctgaggcactggcctggtgggaagatatggtcgccgagtttcacgaccaggtcccatttgacgggatgtggatcgacatgaacgagccatccaacttcattagaggaagtgtggatggctgtccgaataatgagctggaaaaccctccttacgtaccaggcgttgttggtgggactcttcaagctgcgacgatttgcgcatcctcccatcagttcctgtcaacccactataacttgcacaatctgtacgggacaacagaggctatcgccagtcatagggccctggtaaaagctagaggaacacgccctttcgttatctctcgctcaacttttgcaggccacggtaggtatgccggacattggaccggcgacgtctggagttcttgggaacagctggcttcctccgttccagagatattgcagtttaacctgttgggagtcccacttgtaggtgcagatgtttgtggcttcctggggaacacctcagaagaattgtgcgtaagatggactcaactgggcgccttctacccttttatgcgcaatcacaactcactgacatctttgcctcaagaaccgtactcatttagtgagccagcacagcaggccatgaggaaggctcttggcctgagatatgcacttctgccgcatctgtacacccttttccaccaggctcatgtccatggagagactgttgcacgacctctgttcttggagttcccaaaagactcttccacgtggacagtcgatcaccagatgctgtggggcgaggctctgctgattacacctgtattgcaacctggtaaggccgaagttaccgggtactttccattggggacctggtatgatctgcaaacagtcccggttgaagctcttggaagtcttccacctccacctgctgcaccaagggagcctgcgatccactctgaaggacagtgggtaactttgcctgcaccgctggacaccatcaatgtccatctgcgcgaaggctacatcataccacttcaaggtcctggactgaccactacagagtctagaaaacaaccaatggctcttgctgttgcactgactaaaagcggcgaagcaaggggtgagctgttctgggacgacggagagtcactggaggtactcgaacgaggcgcgtatacgcaggtcatttttgaggctcgcaataatacgatcgttaacgagctggtccacgtcacttcagaaggtgcaggccttcagttgggcaaggtaactgtcctgggagttgctacagcaccgcagcaggtcttgtccaacggacggcccgtaagcaactttacctatagtcctgataccaaagttctggacatctgcgttgctctgctgatgggtgagcagttcctggtatcatggtgc

SEQ ID NO: 248 - protein, 944 aa, synthetic construct
  REGION 1..944: note = Variant of the Homo Sapiens Lysosomal alpha-glucosidase
MEWSWVFLFFLSVTTGVHSGHILWHDFSTVPRELSGSSQVLEETHPAHQVGASRPGPRDAQLHPGRPRAVPTQCDVPLNSRFDCAPEKAITQEQCEARGCCYIPAKQGLQGAQMGQPWCFFPPSYPSYKLENLSQSEMGYTATLTRTTPSFFPKDILTLRLDVMMETENRLHFTIKDPANRRYEVPLETPHVHSRAPSPLYSVEFSEEPFGVIVRRQLDGRVLLNTTVAPLFFADQFLQLSTSLPSQYITGLAEHLSPLMLSTSWNKITLWNRDLAPTPGANLYGSHPFYLALEDGGSAHGVFLLNSNAMDVVLQPSPALSWRSTGGILDVYIFLGPEPKSVVQQYLDVVGYPFMPPYWGLGFHLCRWGYSSTAITRQVVENMTRAHFPLDVQWNDLDYMDSRRDFTFNKDGFRDFPAMVQELHQGGRRYMMIVDPGISSSGPAGSYRPYDEGLRRGVFITNETGQPLIGKVWPGSTAFPDFTNPEALAWWEDMVAEFHDQVPFDGMWIDMNEPSNFIRGSVDGCPNNELENPPYVPGVVGGTLQAATICASSHQFLSTHYNLHNLYGTTEAIASHRALVKARGTRPFVISRSTFAGHGRYAGHWTGDVWSSWEQLASSVPEILQFNLLGVPLVGADVCGFLGNTSEELCVRWTQLGAFYPFMRNHNSLTSLPQEPYSFSEPAQQAMRKALGLRYALLPHLYTLFHQAHVHGETVARPLFLEFPKDSSTWTVDHQMLWGEALLITPVLQPGKAEVTGYFPLGTWYDLQTVPVEALGSLPPPPAAPREPAIHSEGQWVTLPAPLDTINVHLREGYIIPLQGPGLTTTESRKQPMALAVALTKSGEARGELFWDDGESLEVLERGAYTQVIFEARNNTIVNELVHVTSEGAGLQLGKVTVLGVATAPQQVLSNGRPVSNFTYSPDTKVLDICVALLMGEQFLVSWC

SEQ ID NO: 249 - DNA, 2832 bp, synthetic construct
  misc_feature 1..2832: note = Variant of the Homo Sapiens Lysosomal alpha-glucosidase
  source 1..2832: mol_type = other DNA
atggaatggagctgggtctttctcttcttcctgtcagtaacgactggtgtccactccggacacattctgccgcatgatttttctaccgtgcctagagagctttccggttcaagtcaagtcctcgaagaaacacatccagcccatcaggttggcgcatctaggccgggccctcgggacgctcaactccacccagggagacctagggccgttcccactcagtgcgacgtgccagagaactcacgcttcgattgtgcacctgagaaggctatcacgcaagagcagtgcgaggcccgcggatgttgttacataccggctaaacaggggctgcagggtgcgcagatgggccaaccttggtgcttcttcccaccatcctatccgagttacaagctggagaatctctcccagtctgaaatgggatataccgcaacactgactcggaccaccccctccttctttcccaaagatatcttgactctgagacttgacgtaatgatggagacagaaaacaggctccactttaccattaaggaccctgccaatcgccgatacgaggtgcctctggaaacaccacacgtgcacagtagagctccatcacctctgtattctgtcgagttctccgaagagccgtttggcgttatcgtcaggaggcagctcgacgggcgagtgcttctgaacacgactgtggccccgttgttctttgcggatcagtttctgcaactgtcaacaagtctcccttctcagtacattaccgggcttgcagagcatctgtccccactcatgctgagtacttcatggaacaaaatcacactgtggaatagagaccttgctcctactccaggagccaacttgtatggttctcaccctttctacttggccctggaagatggcggatcagcgcatggcgtattcctcctgaattccaacgcaatggacgttgttcttcagccatctcctgctttgagttggagatctacaggcgggatactggacgtctacatctttctgggtccagagcctaaatccgtagtgcagcagtatcttgatgtcgtcggatacccgtttatgccaccatattggggcctggggttccacttgtgccgctggggatattcatccaccgccattacacgacaagttgttgagaatatgaccagggcacattttcctctggatgtacagtggaacgacctggactacatggatagtcgccgcgacttcaccttcaataaggatgggttcagagactttcctgctatggtccaagaacttcaccagggaggcaggaggtacatgatgatcgtagatccgggaatttcttcttctggcccagccggttcatacagaccgtatgacgaaggactgcgacgaggcgtctttatcacgaacgagactggtcagcctttgataggcaaggtttggccagggtccaccgctttcccggatttcacaaatcctgaggcactggcctggtgggaagatatggtcgccgagtttcacgaccaggtcccatttgacgggatgtggatcgacatgaacgagccatccaacttcattagaggaagtgtggatggctgtccgaataatgagctggaaaaccctccttacgtaccaggcgttgttggtgggactcttcaagctgcgacgatttgcgcatcctcccatcagttcctgtcaacccactataacttgcacaatctgtacgggacaacagaggctatcgccagtcatagggccctggtaaaagctagaggaacacgccctttcgttatctctcgctcaacttttgcaggccacggtaggtatgccggacattggaccggcgacgtctggagttcttgggaacagctggcttcctccgttccagagatattgcagtttaacctgttgggagtcccacttgtaggtgcagatgtttgtggcttcctggggaacacctcagaagaattgtgcgtaagatggactcaactgggcgccttctacccttttatgcgcaatcacaactcactgacatctttgcctcaagaaccgtactcatttagtgagccagcacagcaggccatgaggaaggctcttggcctgagatatgcacttctgccgcatctgtacacccttttccaccaggctcatgtccatggagagactgttgcacgacctctgttcttggagttcccaaaagactcttccacgtggacagtcgatcaccagatgctgtggggcgaggctctgctgattacacctgtattgcaacctggtaaggccgaagttaccgggtactttccattggggacctggtatgatctgcaaacagtcccggttgaagctcttggaagtcttccacctccacctgctgcaccaagggagcctgcgatccactctgaaggacagtgggtaactttgcctgcaccgctggacaccatcaatgtccatctgcgcgaaggctacatcataccacttcaaggtcctggactgaccactacagagtctagaaaacaaccaatggctcttgctgttgcactgactaaaagcggcgaagcaaggggtgagctgttctgggacgacggagagtcactggaggtactcgaacgaggcgcgtatacgcaggtcatttttgaggctcgcaataatacgatcgttaacgagctggtccacgtcacttcagaaggtgcaggccttcagttgggcaaggtaactgtcctgggagttgctacagcaccgcagcaggtcttgtccaacggacggcccgtaagcaactttacctatagtcctgataccaaagttctggacatctgcgttgctctgctgatgggtgagcagttcctggtatcatggtgc

SEQ ID NO: 250 - protein, 944 aa, synthetic construct
  REGION 1..944: note = Variant of the Homo Sapiens Lysosomal alpha-glucosidase
MEWSWVFLFFLSVTTGVHSGHILPHDFSTVPRELSGSSQVLEETHPAHQVGASRPGPRDAQLHPGRPRAVPTQCDVPENSRFDCAPEKAITQEQCEARGCCYIPAKQGLQGAQMGQPWCFFPPSYPSYKLENLSQSEMGYTATLTRTTPSFFPKDILTLRLDVMMETENRLHFTIKDPANRRYEVPLETPHVHSRAPSPLYSVEFSEEPFGVIVRRQLDGRVLLNTTVAPLFFADQFLQLSTSLPSQYITGLAEHLSPLMLSTSWNKITLWNRDLAPTPGANLYGSHPFYLALEDGGSAHGVFLLNSNAMDVVLQPSPALSWRSTGGILDVYIFLGPEPKSVVQQYLDVVGYPFMPPYWGLGFHLCRWGYSSTAITRQVVENMTRAHFPLDVQWNDLDYMDSRRDFTFNKDGFRDFPAMVQELHQGGRRYMMIVDPGISSSGPAGSYRPYDEGLRRGVFITNETGQPLIGKVWPGSTAFPDFTNPEALAWWEDMVAEFHDQVPFDGMWIDMNEPSNFIRGSVDGCPNNELENPPYVPGVVGGTLQAATICASSHQFLSTHYNLHNLYGTTEAIASHRALVKARGTRPFVISRSTFAGHGRYAGHWTGDVWSSWEQLASSVPEILQFNLLGVPLVGADVCGFLGNTSEELCVRWTQLGAFYPFMRNHNSLTSLPQEPYSFSEPAQQAMRKALGLRYALLPHLYTLFHQAHVHGETVARPLFLEFPKDSSTWTVDHQMLWGEALLITPVLQPGKAEVTGYFPLGTWYDLQTVPVEALGSLPPPPAAPREPAIHSEGQWVTLPAPLDTINVHLREGYIIPLQGPGLTTTESRKQPMALAVALTKSGEARGELFWDDGESLEVLERGAYTQVIFEARNNTIVNELVHVTSEGAGLQLGKVTVLGVATAPQQVLSNGRPVSNFTYSPDTKVLDICVALLMGEQFLVSWC

SEQ ID NO: 251 - DNA, 2832 bp, synthetic construct
  misc_feature 1..2832: note = Variant of the Homo Sapiens Lysosomal alpha-glucosidase
  source 1..2832: mol_type = other DNA
atggaatggagctgggtctttctcttcttcctgtcagtaacgactggtgtccactccggacacattctggatcatgatttttctaccgtgcctagagagctttccggttcaagtcaagtcctcgaagaaacacatccagcccatcaggttggcgcatctaggccgggccctcgggacgctcaactccacccagggagacctagggccgttcccactcagtgcgacgtgccagagaactcacgcttcgattgtgcacctgagaaggctatcacgcaagagcagtgcgaggcccgcggatgttgttacataccggctaaacaggggctgcagggtgcgcagatgggccaaccttggtgcttcttcccaccatcctatccgagttacaagctggagaatctctcccagtctgaaatgggatataccgcaacactgactcggaccaccccctccttctttcccaaagatatcttgactctgagacttgacgtaatgatggagacagaaaacaggctccactttaccattaaggaccctgccaatcgccgatacgaggtgcctctggaaacaccacacgtgcacagtagagctccatcacctctgtattctgtcgagttctccgaagagccgtttggcgttatcgtcaggaggcagctcgacgggcgagtgcttctgaacacgactgtggccccgttgttctttgcggatcagtttctgcaactgtcaacaagtctcccttctcagtacattaccgggcttgcagagcatctgtccccactcatgctgagtacttcatggaacaaaatcacactgtggaatagagaccttgctcctactccaggagccaacttgtatggttctcaccctttctacttggccctggaagatggcggatcagcgcatggcgtattcctcctgaattccaacgcaatggacgttgttcttcagccatctcctgctttgagttggagatctacaggcgggatactggacgtctacatctttctgggtccagagcctaaatccgtagtgcagcagtatcttgatgtcgtcggatacccgtttatgccaccatattggggcctggggttccacttgtgccgctggggatattcatccaccgccattacacgacaagttgttgagaatatgaccagggcacattttcctctggatgtacagtggaacgacctggactacatggatagtcgccgcgacttcaccttcaataaggatgggttcagagactttcctgctatggtccaagaacttcaccagggaggcaggaggtacatgatgatcgtagatccgggaatttcttcttctggcccagccggttcatacagaccgtatgacgaaggactgcgacgaggcgtctttatcacgaacgagactggtcagcctttgataggcaaggtttggccagggtccaccgctttcccggatttcacaaatcctgaggcactggcctggtgggaagatatggtcgccgagtttcacgaccaggtcccatttgacgggatgtggatcgacatgaacgagccatccaacttcattagaggaagtgtggatggctgtccgaataatgagctggaaaaccctccttacgtaccaggcgttgttggtgggactcttcaagctgcgacgatttgcgcatcctcccatcagttcctgtcaacccactataacttgcacaatctgtacgggacaacagaggctatcgccagtcatagggccctggtaaaagctagaggaacacgccctttcgttatctctcgctcaacttttgcaggccacggtaggtatgccggacattggaccggcgacgtctggagttcttgggaacagctggcttcctccgttccagagatattgcagtttaacctgttgggagtcccacttgtaggtgcagatgtttgtggcttcctggggaacacctcagaagaattgtgcgtaagatggactcaactgggcgccttctacccttttatgcgcaatcacaactcactgacatctttgcctcaagaaccgtactcatttagtgagccagcacagcaggccatgaggaaggctcttggcctgagatatgcacttctgccgcatctgtacacccttttccaccaggctcatgtccatggagagactgttgcacgacctctgttcttggagttcccaaaagactcttccacgtggacagtcgatcaccagatgctgtggggcgaggctctgctgattacacctgtattgcaacctggtaaggccgaagttaccgggtactttccattggggacctggtatgatctgcaaacagtcccggttgaagctcttggaagtcttccacctccacctgctgcaccaagggagcctgcgatccactctgaaggacagtgggtaactttgcctgcaccgctggacaccatcaatgtccatctgcgcgaaggctacatcataccacttcaaggtcctggactgaccactacagagtctagaaaacaaccaatggctcttgctgttgcactgactaaaagcggcgaagcaaggggtgagctgttctgggacgacggagagtcactggaggtactcgaacgaggcgcgtatacgcaggtcatttttgaggctcgcaataatacgatcgttaacgagctggtccacgtcacttcagaaggtgcaggccttcagttgggcaaggtaactgtcctgggagttgctacagcaccgcagcaggtcttgtccaacggacggcccgtaagcaactttacctatagtcctgataccaaagttctggacatctgcgttgctctgctgatgggtgagcagttcctggtatcatggtgc

SEQ ID NO: 252 - protein, 944 aa, synthetic construct
  REGION 1..944: note = Variant of the Homo Sapiens Lysosomal alpha-glucosidase
MEWSWVFLFFLSVTTGVHSGHILDHDFSTVPRELSGSSQVLEETHPAHQVGASRPGPRDAQLHPGRPRAVPTQCDVPENSRFDCAPEKAITQEQCEARGCCYIPAKQGLQGAQMGQPWCFFPPSYPSYKLENLSQSEMGYTATLTRTTPSFFPKDILTLRLDVMMETENRLHFTIKDPANRRYEVPLETPHVHSRAPSPLYSVEFSEEPFGVIVRRQLDGRVLLNTTVAPLFFADQFLQLSTSLPSQYITGLAEHLSPLMLSTSWNKITLWNRDLAPTPGANLYGSHPFYLALEDGGSAHGVFLLNSNAMDVVLQPSPALSWRSTGGILDVYIFLGPEPKSVVQQYLDVVGYPFMPPYWGLGFHLCRWGYSSTAITRQVVENMTRAHFPLDVQWNDLDYMDSRRDFTFNKDGFRDFPAMVQELHQGGRRYMMIVDPGISSSGPAGSYRPYDEGLRRGVFITNETGQPLIGKVWPGSTAFPDFTNPEALAWWEDMVAEFHDQVPFDGMWIDMNEPSNFIRGSVDGCPNNELENPPYVPGVVGGTLQAATICASSHQFLSTHYNLHNLYGTTEAIASHRALVKARGTRPFVISRSTFAGHGRYAGHWTGDVWSSWEQLASSVPEILQFNLLGVPLVGADVCGFLGNTSEELCVRWTQLGAFYPFMRNHNSLTSLPQEPYSFSEPAQQAMRKALGLRYALLPHLYTLFHQAHVHGETVARPLFLEFPKDSSTWTVDHQMLWGEALLITPVLQPGKAEVTGYFPLGTWYDLQTVPVEALGSLPPPPAAPREPAIHSEGQWVTLPAPLDTINVHLREGYIIPLQGPGLTTTESRKQPMALAVALTKSGEARGELFWDDGESLEVLERGAYTQVIFEARNNTIVNELVHVTSEGAGLQLGKVTVLGVATAPQQVLSNGRPVSNFTYSPDTKVLDICVALLMGEQFLVSWC

SEQ ID NO: 253 - DNA, 2832 bp, synthetic construct
  misc_feature 1..2832: note = Variant of the Homo Sapiens Lysosomal alpha-glucosidase
  source 1..2832: mol_type = other DNA
atggaatggagctgggtctttctcttcttcctgtcagtaacgactggtgtccactccggacacattctgtggcatgatttttctaccgtgcctagagagctttccggttcaagtcaagtcctcgaagaaacacatccagcccatcaggttggcgcatctaggccgggccctcgggacgctcaactccacccagggagacctagggccgttcccactcagtgcgacgtgccagagaactcacgcttcgattgtgcacctgagaaggctatcacgcaagagcagtgcgaggcccgcggatgttgttacataccggctaaacaggggctgcagggtgcgcagatgggccaaccttggtgcttcttcccaccatcctatccgagttacaagctggagaatctctcccagtctgaaatgggatataccgcaacactgactcggaccaccccctccttctttcccaaagatatcttgactctgagacttgacgtaatgatggagacagaaaacaggctccactttaccattaaggaccctgccaatcgccgatacgaggtgcctctggaaacaccacacgtgcacagtagagctccatcacctctgtattctgtcgagttctccgaagagccgtttggcgttatcgtcaggaggcagctcgacgggcgagtgcttctgaacacgactgtggccccgttgttctttgcggatcagtttctgcaactgtcaacaagtctcccttctcagtacattaccgggcttgcagagcatctgtccccactcatgctgagtacttcatggaacaaaatcacactgtggaatagagaccttgctcctactccaggagccaacttgtatggttctcaccctttctacttggccctggaagatggcggatcagcgcatggcgtattcctcctgaattccaacgcaatggacgttgttcttcagccatctcctgctttgagttggagatctacaggcgggatactggacgtctacatctttctgggtccagagcctaaatccgtagtgcagcagtatcttgatgtcgtcggatacccgtttatgccaccatattggggcctggggttccacttgtgccgctggggatattcatccaccgccattacacgacaagttgttgagaatatgaccagggcacattttcctctggatgtacagtggaacgacctggactacatggatagtcgccgcgacttcaccttcaataaggatgggttcagagactttcctgctatggtccaagaacttcaccagggaggcaggaggtacatgatgatcgtagatccgggaatttcttcttctggcccagccggttcatacagaccgtatgacgaaggactgcgacgaggcgtctttatcacgaacgagactggtcagcctttgataggcaaggtttggccagggtccaccgctttcccggatttcacaaatcctgaggcactggcctggtgggaagatatggtcgccgagtttcacgaccaggtcccatttgacgggatgtggatcgacatgaacgagccatccaacttcattagaggaagtgtggatggctgtccgaataatgagctggaaaaccctccttacgtaccaggcgttgttggtgggactcttcaagctgcgacgatttgcgcatcctcccatcagttcctgtcaacccactataacttgcacaatctgtacgggacaacagaggctatcgccagtcatagggccctggtaaaagctagaggaacacgccctttcgttatctctcgctcaacttttgcaggccacggtaggtatgccggacattggaccggcgacgtctggagttcttgggaacagctggcttcctccgttccagagatattgcagtttaacctgttgggagtcccacttgtaggtgcagatgtttgtggcttcctggggaacacctcagaagaattgtgcgtaagatggactcaactgggcgccttctacccttttatgcgcaatcacaactcactgacatctttgcctcaagaaccgtactcatttagtgagccagcacagcaggccatgaggaaggctcttaagctgagatatgcacttctgccgcatctgtacacccttttccaccaggctcatgtccatggagagactgttgcacgacctctgttcttggagttcccaaaagactcttccacgtggacagtcgatcaccagatgctgtggggcgaggctctgctgattacacctgtattgcaacctggtaaggccgaagttaccgggtactttccattggggacctggtatgatctgcaaacagtcccggttgaagctcttggaagtcttccacctccacctgctgcaccaagggagcctgcgatccactctgaaggacagtgggtaactttgcctgcaccgctggacaccatcaatgtccatctgcgcgaaggctacatcataccacttcaaggtcctggactgaccactacagagtctagaaaacaaccaatggctcttgctgttgcactgactaaaagcggcgaagcaaggggtgagctgttctgggacgacggagagtcactggaggtactcgaacgaggcgcgtatacgcaggtcatttttgaggctcgcaataatacgatcgttaacgagctggtccacgtcacttcagaaggtgcaggccttcagttgggcaaggtaactgtcctgggagttgctacagcaccgcagcaggtcttgtccaacggacggcccgtaagcaactttacctatagtcctgataccaaagttctggacatctgcgttgctctgctgatgggtgagcagttcctggtatcatggtgc

SEQ ID NO: 254 - protein, 944 aa, synthetic construct
  REGION 1..944: note = Variant of the Homo Sapiens Lysosomal alpha-glucosidase
MEWSWVFLFFLSVTTGVHSGHILWHDFSTVPRELSGSSQVLEETHPAHQVGASRPGPRDAQLHPGRPRAVPTQCDVPENSRFDCAPEKAITQEQCEARGCCYIPAKQGLQGAQMGQPWCFFPPSYPSYKLENLSQSEMGYTATLTRTTPSFFPKDILTLRLDVMMETENRLHFTIKDPANRRYEVPLETPHVHSRAPSPLYSVEFSEEPFGVIVRRQLDGRVLLNTTVAPLFFADQFLQLSTSLPSQYITGLAEHLSPLMLSTSWNKITLWNRDLAPTPGANLYGSHPFYLALEDGGSAHGVFLLNSNAMDVVLQPSPALSWRSTGGILDVYIFLGPEPKSVVQQYLDVVGYPFMPPYWGLGFHLCRWGYSSTAITRQVVENMTRAHFPLDVQWNDLDYMDSRRDFTFNKDGFRDFPAMVQELHQGGRRYMMIVDPGISSSGPAGSYRPYDEGLRRGVFITNETGQPLIGKVWPGSTAFPDFTNPEALAWWEDMVAEFHDQVPFDGMWIDMNEPSNFIRGSVDGCPNNELENPPYVPGVVGGTLQAATICASSHQFLSTHYNLHNLYGTTEAIASHRALVKARGTRPFVISRSTFAGHGRYAGHWTGDVWSSWEQLASSVPEILQFNLLGVPLVGADVCGFLGNTSEELCVRWTQLGAFYPFMRNHNSLTSLPQEPYSFSEPAQQAMRKALKLRYALLPHLYTLFHQAHVHGETVARPLFLEFPKDSSTWTVDHQMLWGEALLITPVLQPGKAEVTGYFPLGTWYDLQTVPVEALGSLPPPPAAPREPAIHSEGQWVTLPAPLDTINVHLREGYIIPLQGPGLTTTESRKQPMALAVALTKSGEARGELFWDDGESLEVLERGAYTQVIFEARNNTIVNELVHVTSEGAGLQLGKVTVLGVATAPQQVLSNGRPVSNFTYSPDTKVLDICVALLMGEQFLVSWC

SEQ ID NO: 255 - DNA, 2832 bp, synthetic construct
  misc_feature 1..2832: note = Variant of the Homo Sapiens Lysosomal alpha-glucosidase
  source 1..2832: mol_type = other DNA
atggaatggagctgggtctttctcttcttcctgtcagtaacgactggtgtccactccggacacattctgtggcatgatttttctgatgtgcctagagagctttccggttcaagtcaagtcctcgaagaaacacatccagcccatcaggttggcgcatctaggccgggccctcgggacgctcaactccacccagggagacctagggccgttcccactcagtgcgacgtgccagagaactcacgcttcgattgtgcacctgagaaggctatcacgcaagagcagtgcgaggcccgcggatgttgttacataccggctaaacaggggctgcagggtgcgcagatgggccaaccttggtgcttcttcccaccatcctatccgagttacaagctggagaatctctcccagtctgaaatgggatataccgcaacactgactcggaccaccccctccttctttcccaaagatatcttgactctgagacttgacgtaatgatggagacagaaaacaggctccactttaccattaaggaccctgccaatcgccgatacgaggtgcctctggaaacaccacacgtgcacagtagagctccatcacctctgtattctgtcgagttctccgaagagccgtttggcgttatcgtcaggaggcagctcgacgggcgagtgcttctgaacacgactgtggccccgttgttctttgcggatcagtttctgcaactgtcaacaagtctcccttctcagtacattaccgggcttgcagagcatctgtccccactcatgctgagtacttcatggaacaaaatcacactgtggaatagagaccttgctcctactccaggagccaacttgtatggttctcaccctttctacttggccctggaagatggcggatcagcgcatggcgtattcctcctgaattccaacgcaatggacgttgttcttcagccatctcctgctttgagttggagatctacaggcgggatactggacgtctacatctttctgggtccagagcctaaatccgtagtgcagcagtatcttgatgtcgtcggatacccgtttatgccaccatattggggcctggggttccacttgtgccgctggggatattcatccaccgccattacacgacaagttgttgagaatatgaccagggcacattttcctctggatgtacagtggaacgacctggactacatggatagtcgccgcgacttcaccttcaataaggatgggttcagagactttcctgctatggtccaagaacttcaccagggaggcaggaggtacatgatgatcgtagatccgggaatttcttcttctggcccagccggttcatacagaccgtatgacgaaggactgcgacgaggcgtctttatcacgaacgagactggtcagcctttgataggcaaggtttggccagggtccaccgctttcccggatttcacaaatcctgaggcactggcctggtgggaagatatggtcgccgagtttcacgaccaggtcccatttgacgggatgtggatcgacatgaacgagccatccaacttcattagaggaagtgtggatggctgtccgaataatgagctggaaaaccctccttacgtaccaggcgttgttggtgggactcttcaagctgcgacgatttgcgcatcctcccatcagttcctgtcaacccactataacttgcacaatctgtacgggacaacagaggctatcgccagtcatagggccctggtaaaagctagaggaacacgccctttcgttatctctcgctcaacttttgcaggccacggtaggtatgccggacattggaccggcgacgtctggagttcttgggaacagctggcttcctccgttccagagatattgcagtttaacctgttgggagtcccacttgtaggtgcagatgtttgtggcttcctggggaacacctcagaagaattgtgcgtaagatggactcaactgggcgccttctacccttttatgcgcaatcacaactcactgacatctttgcctcaagaaccgtactcatttagtgagccagcacagcaggccatgaggaaggctcttggcctgagatatgcacttctgccgcatctgtacacccttttccaccaggctcatgtccatggagagactgttgcacgacctctgttcttggagttcccaaaagactcttccacgtggacagtcgatcaccagatgctgtggggcgaggctctgctgattacacctgtattgcaacctggtaaggccgaagttaccgggtactttccattggggacctggtatgatctgcaaacagtcccggttgaagctcttggaagtcttccacctccacctgctgcaccaagggagcctgcgatccactctgaaggacagtgggtaactttgcctgcaccgctggacaccatcaatgtccatctgcgcgaaggctacatcataccacttcaaggtcctggactgaccactacagagtctagaaaacaaccaatggctcttgctgttgcactgactaaaagcggcgaagcaaggggtgagctgttctgggacgacggagagtcactggaggtactcgaacgaggcgcgtatacgcaggtcatttttgaggctcgcaataatacgatcgttaacgagctggtccacgtcacttcagaaggtgcaggccttcagttgggcaaggtaactgtcctgggagttgctacagcaccgcagcaggtcttgtccaacggacggcccgtaagcaactttacctatagtcctgataccaaagttctggacatctgcgttgctctgctgatgggtgagcagttcctggtatcatggtgc

SEQ ID NO: 256 - protein, 944 aa, synthetic construct
  REGION 1..944: note = Variant of the Homo Sapiens Lysosomal alpha-glucosidase
MEWSWVFLFFLSVTTGVHSGHILWHDFSDVPRELSGSSQVLEETHPAHQVGASRPGPRDAQLHPGRPRAVPTQCDVPENSRFDCAPEKAITQEQCEARGCCYIPAKQGLQGAQMGQPWCFFPPSYPSYKLENLSQSEMGYTATLTRTTPSFFPKDILTLRLDVMMETENRLHFTIKDPANRRYEVPLETPHVHSRAPSPLYSVEFSEEPFGVIVRRQLDGRVLLNTTVAPLFFADQFLQLSTSLPSQYITGLAEHLSPLMLSTSWNKITLWNRDLAPTPGANLYGSHPFYLALEDGGSAHGVFLLNSNAMDVVLQPSPALSWRSTGGILDVYIFLGPEPKSVVQQYLDVVGYPFMPPYWGLGFHLCRWGYSSTAITRQVVENMTRAHFPLDVQWNDLDYMDSRRDFTFNKDGFRDFPAMVQELHQGGRRYMMIVDPGISSSGPAGSYRPYDEGLRRGVFITNETGQPLIGKVWPGSTAFPDFTNPEALAWWEDMVAEFHDQVPFDGMWIDMNEPSNFIRGSVDGCPNNELENPPYVPGVVGGTLQAATICASSHQFLSTHYNLHNLYGTTEAIASHRALVKARGTRPFVISRSTFAGHGRYAGHWTGDVWSSWEQLASSVPEILQFNLLGVPLVGADVCGFLGNTSEELCVRWTQLGAFYPFMRNHNSLTSLPQEPYSFSEPAQQAMRKALGLRYALLPHLYTLFHQAHVHGETVARPLFLEFPKDSSTWTVDHQMLWGEALLITPVLQPGKAEVTGYFPLGTWYDLQTVPVEALGSLPPPPAAPREPAIHSEGQWVTLPAPLDTINVHLREGYIIPLQGPGLTTTESRKQPMALAVALTKSGEARGELFWDDGESLEVLERGAYTQVIFEARNNTIVNELVHVTSEGAGLQLGKVTVLGVATAPQQVLSNGRPVSNFTYSPDTKVLDICVALLMGEQFLVSWC

SEQ ID NO: 257 - DNA, 2832 bp, synthetic construct
  misc_feature 1..2832: note = Variant of the Homo Sapiens Lysosomal alpha-glucosidase
  source 1..2832: mol_type = other DNA
atggaatggagctgggtctttctcttcttcctgtcagtaacgactggtgtccactccggacacattctgtggcatgatttttctaccgtgcctagagagctttccggttcaagtcaagtcctcgaagaaacacatccagcccatcagtatggcgcatctaggccgggccctcgggacgctcaactccacccagggagacctagggccgttcccactcagtgcgacgtgccagagaactcacgcttcgattgtgcacctgagaaggctatcacgcaagagcagtgcgaggcccgcggatgttgttacataccggctaaacaggggctgcagggtgcgcagatgggccaaccttggtgcttcttcccaccatcctatccgagttacaagctggagaatctctcccagtctgaaatgggatataccgcaacactgactcggaccaccccctccttctttcccaaagatatcttgactctgagacttgacgtaatgatggagacagaaaacaggctccactttaccattaaggaccctgccaatcgccgatacgaggtgcctctggaaacaccacacgtgcacagtagagctccatcacctctgtattctgtcgagttctccgaagagccgtttggcgttatcgtcaggaggcagctcgacgggcgagtgcttctgaacacgactgtggccccgttgttctttgcggatcagtttctgcaactgtcaacaagtctcccttctcagtacattaccgggcttgcagagcatctgtccccactcatgctgagtacttcatggaacaaaatcacactgtggaatagagaccttgctcctactccaggagccaacttgtatggttctcaccctttctacttggccctggaagatggcggatcagcgcatggcgtattcctcctgaattccaacgcaatggacgttgttcttcagccatctcctgctttgagttggagatctacaggcgggatactggacgtctacatctttctgggtccagagcctaaatccgtagtgcagcagtatcttgatgtcgtcggatacccgtttatgccaccatattggggcctggggttccacttgtgccgctggggatattcatccaccgccattacacgacaagttgttgagaatatgaccagggcacattttcctctggatgtacagtggaacgacctggactacatggatagtcgccgcgacttcaccttcaataaggatgggttcagagactttcctgctatggtccaagaacttcaccagggaggcaggaggtacatgatgatcgtagatccgggaatttcttcttctggcccagccggttcatacagaccgtatgacgaaggactgcgacgaggcgtctttatcacgaacgagactggtcagcctttgataggcaaggtttggccagggtccaccgctttcccggatttcacaaatcctgaggcactggcctggtgggaagatatggtcgccgagtttcacgaccaggtcccatttgacgggatgtggatcgacatgaacgagccatccaacttcattagaggaagtgtggatggctgtccgaataatgagctggaaaaccctccttacgtaccaggcgttgttggtgggactcttcaagctgcgacgatttgcgcatcctcccatcagttcctgtcaacccactataacttgcacaatctgtacgggacaacagaggctatcgccagtcatagggccctggtaaaagctagaggaacacgccctttcgttatctctcgctcaacttttgcaggccacggtaggtatgccggacattggaccggcgacgtctggagttcttgggaacagctggcttcctccgttccagagatattgcagtttaacctgttgggagtcccacttgtaggtgcagatgtttgtggcttcctggggaacacctcagaagaattgtgcgtaagatggactcaactgggcgccttctacccttttatgcgcaatcacaactcactgacatctttgcctcaagaaccgtactcatttagtgagccagcacagcaggccatgaggaaggctcttggcctgagatatgcacttctgccgcatctgtacacccttttccaccaggctcatgtccatggagagactgttgcacgacctctgttcttggagttcccaaaagactcttccacgtggacagtcgatcaccagatgctgtggggcgaggctctgctgattacacctgtattgcaacctggtaaggccgaagttaccgggtactttccattggggacctggtatgatctgcaaacagtcccggttgaagctcttggaagtcttccacctccacctgctgcaccaagggagcctgcgatccactctgaaggacagtgggtaactttgcctgcaccgctggacaccatcaatgtccatctgcgcgaaggctacatcataccacttcaaggtcctggactgaccactacagagtctagaaaacaaccaatggctcttgctgttgcactgactaaaagcggcgaagcaaggggtgagctgttctgggacgacggagagtcactggaggtactcgaacgaggcgcgtatacgcaggtcatttttgaggctcgcaataatacgatcgttaacgagctggtccacgtcacttcagaaggtgcaggccttcagttgggcaaggtaactgtcctgggagttgctacagcaccgcagcaggtcttgtccaacggacggcccgtaagcaactttacctatagtcctgataccaaagttctggacatctgcgttgctctgctgatgggtgagcagttcctggtatcatggtgc

SEQ ID NO: 258 - protein, 944 aa, synthetic construct
  REGION 1..944: note = Variant of the Homo Sapiens Lysosomal alpha-glucosidase
MEWSWVFLFFLSVTTGVHSGHILWHDFSTVPRELSGSSQVLEETHPAHQYGASRPGPRDAQLHPGRPRAVPTQCDVPENSRFDCAPEKAITQEQCEARGCCYIPAKQGLQGAQMGQPWCFFPPSYPSYKLENLSQSEMGYTATLTRTTPSFFPKDILTLRLDVMMETENRLHFTIKDPANRRYEVPLETPHVHSRAPSPLYSVEFSEEPFGVIVRRQLDGRVLLNTTVAPLFFADQFLQLSTSLPSQYITGLAEHLSPLMLSTSWNKITLWNRDLAPTPGANLYGSHPFYLALEDGGSAHGVFLLNSNAMDVVLQPSPALSWRSTGGILDVYIFLGPEPKSVVQQYLDVVGYPFMPPYWGLGFHLCRWGYSSTAITRQVVENMTRAHFPLDVQWNDLDYMDSRRDFTFNKDGFRDFPAMVQELHQGGRRYMMIVDPGISSSGPAGSYRPYDEGLRRGVFITNETGQPLIGKVWPGSTAFPDFTNPEALAWWEDMVAEFHDQVPFDGMWIDMNEPSNFIRGSVDGCPNNELENPPYVPGVVGGTLQAATICASSHQFLSTHYNLHNLYGTTEAIASHRALVKARGTRPFVISRSTFAGHGRYAGHWTGDVWSSWEQLASSVPEILQFNLLGVPLVGADVCGFLGNTSEELCVRWTQLGAFYPFMRNHNSLTSLPQEPYSFSEPAQQAMRKALGLRYALLPHLYTLFHQAHVHGETVARPLFLEFPKDSSTWTVDHQMLWGEALLITPVLQPGKAEVTGYFPLGTWYDLQTVPVEALGSLPPPPAAPREPAIHSEGQWVTLPAPLDTINVHLREGYIIPLQGPGLTTTESRKQPMALAVALTKSGEARGELFWDDGESLEVLERGAYTQVIFEARNNTIVNELVHVTSEGAGLQLGKVTVLGVATAPQQVLSNGRPVSNFTYSPDTKVLDICVALLMGEQFLVSWC

SEQ ID NO: 259 - DNA, 2832 bp, synthetic construct
  misc_feature 1..2832: note = Variant of the Homo Sapiens Lysosomal alpha-glucosidase
  source 1..2832: mol_type = other DNA
atggaatggagctgggtctttctcttcttcctgtcagtaacgactggtgtccactccggacacattctgtggcatgatttttctaccgtgcctagagagctttccggttcaagtcaagtcctcgaagaaacacatccagcccatcaggttggcgcatctaggccgggccctcgggacgctcaactccacccagggagacctagggccgttcccactcagtgcgacgtgccagagaactcacgcttcgattgtgcacctgagaaggctatcacgcaagagcagtgcgaggcccgcggatgttgttacataccggctaaacaggggctgcagggtgcgcagatgggccaaccttggtgcttcttcccaccatcctatccgagttacaagctggagaatctctcccagtctgaaatgggatataccgcaacactgactcggaccaccccctccttctttcccaaagatatcttgactctgagacttgacgtaatgatggagacagaaaacaggctccactttaccattaaggaccctgccaatcgccgatacgaggtgcctctggaaacaccacacgtgcacagtagagctccatcacctctgtattctgtcgagttctccgaagagccgtttggcgttatcgtcaggaggcagctcgacgggcgagtgcttctgaacacgactgtggccccgttgttctttgcggatcagtttctgcaactgtcaacaagtctcccttctcagtacattaccgggcttgcagagcatctgtccccactcatgctgagtacttcatggaacaaaatcacactgtggaatagagaccttgctcctactccaggagccaacttgtatggttctcaccctttctacttggccctggaagatggcggatcagcgcatggcgtattcctcctgaattccaacgcaatggacgttgttcttcagccatctcctgctttgagttggagatctacaggcgggatactggacgtctacatctttctgggtccagagcctaaatccgtagtgcagcagtatcttgatgtcgtcggatacccgtttatgccaccatattggggcctggggttccacttgtgccgctggggatattcatccaccgccattacacgacaagttgttgagaatatgaccagggcacattttcctctggatgtacagtggaacgacctggactacatggatagtcgccgcgacttcaccttcaataaggatgggttcagagactttcctgctatggtccaagaacttcaccagggaggcaggaggtacatgatgatcgtagatccgggaatttcttcttctggcccagccggttcatacagaccgtatgacgaaggactgcgacgaggcgtctttatcacgaacgagactggtcagcctttgataggcaaggtttggccagggtccaccgctttcccggatttcacaaatcctaaggcactggcctggtgggaagatatggtcgccgagtttcacgaccaggtcccatttgacgggatgtggatcgacatgaacgagccatccaacttcattagaggaagtgtggatggctgtccgaataatgagctggaaaaccctccttacgtaccaggcgttgttggtgggactcttcaagctgcgacgatttgcgcatcctcccatcagttcctgtcaacccactataacttgcacaatctgtacgggacaacagaggctatcgccagtcatagggccctggtaaaagctagaggaacacgccctttcgttatctctcgctcaacttttgcaggccacggtaggtatgccggacattggaccggcgacgtctggagttcttgggaacagctggcttcctccgttccagagatattgcagtttaacctgttgggagtcccacttgtaggtgcagatgtttgtggcttcctggggaacacctcagaagaattgtgcgtaagatggactcaactgggcgccttctacccttttatgcgcaatcacaactcactgacatctttgcctcaagaaccgtactcatttagtgagccagcacagcaggccatgaggaaggctcttggcctgagatatgcacttctgccgcatctgtacacccttttccaccaggctcatgtccatggagagactgttgcacgacctctgttcttggagttcccaaaagactcttccacgtggacagtcgatcaccagatgctgtggggcgaggctctgctgattacacctgtattgcaacctggtaaggccgaagttaccgggtactttccattggggacctggtatgatctgcaaacagtcccggttgaagctcttggaagtcttccacctccacctgctgcaccaagggagcctgcgatccactctgaaggacagtgggtaactttgcctgcaccgctggacaccatcaatgtccatctgcgcgaaggctacatcataccacttcaaggtcctggactgaccactacagagtctagaaaacaaccaatggctcttgctgttgcactgactaaaagcggcgaagcaaggggtgagctgttctgggacgacggagagtcactggaggtactcgaacgaggcgcgtatacgcaggtcatttttgaggctcgcaataatacgatcgttaacgagctggtccacgtcacttcagaaggtgcaggccttcagttgggcaaggtaactgtcctgggagttgctacagcaccgcagcaggtcttgtccaacggacggcccgtaagcaactttacctatagtcctgataccaaagttctggacatctgcgttgctctgctgatgggtgagcagttcctggtatcatggtgc

SEQ ID NO: 260 - protein, 944 aa, synthetic construct
  REGION 1..944: note = Variant of the Homo Sapiens Lysosomal alpha-glucosidase
MEWSWVFLFFLSVTTGVHSGHILWHDFSTVPRELSGSSQVLEETHPAHQVGASRPGPRDAQLHPGRPRAVPTQCDVPENSRFDCAPEKAITQEQCEARGCCYIPAKQGLQGAQMGQPWCFFPPSYPSYKLENLSQSEMGYTATLTRTTPSFFPKDILTLRLDVMMETENRLHFTIKDPANRRYEVPLETPHVHSRAPSPLYSVEFSEEPFGVIVRRQLDGRVLLNTTVAPLFFADQFLQLSTSLPSQYITGLAEHLSPLMLSTSWNKITLWNRDLAPTPGANLYGSHPFYLALEDGGSAHGVFLLNSNAMDVVLQPSPALSWRSTGGILDVYIFLGPEPKSVVQQYLDVVGYPFMPPYWGLGFHLCRWGYSSTAITRQVVENMTRAHFPLDVQWNDLDYMDSRRDFTFNKDGFRDFPAMVQELHQGGRRYMMIVDPGISSSGPAGSYRPYDEGLRRGVFITNETGQPLIGKVWPGSTAFPDFTNPKALAWWEDMVAEFHDQVPFDGMWIDMNEPSNFIRGSVDGCPNNELENPPYVPGVVGGTLQAATICASSHQFLSTHYNLHNLYGTTEAIASHRALVKARGTRPFVISRSTFAGHGRYAGHWTGDVWSSWEQLASSVPEILQFNLLGVPLVGADVCGFLGNTSEELCVRWTQLGAFYPFMRNHNSLTSLPQEPYSFSEPAQQAMRKALGLRYALLPHLYTLFHQAHVHGETVARPLFLEFPKDSSTWTVDHQMLWGEALLITPVLQPGKAEVTGYFPLGTWYDLQTVPVEALGSLPPPPAAPREPAIHSEGQWVTLPAPLDTINVHLREGYIIPLQGPGLTTTESRKQPMALAVALTKSGEARGELFWDDGESLEVLERGAYTQVIFEARNNTIVNELVHVTSEGAGLQLGKVTVLGVATAPQQVLSNGRPVSNFTYSPDTKVLDICVALLMGEQFLVSWC

SEQ ID NO: 261 - DNA, 2832 bp, synthetic construct
  misc_feature 1..2832: note = Variant of the Homo Sapiens Lysosomal alpha-glucosidase
  source 1..2832: mol_type = other DNA
atggaatggagctgggtctttctcttcttcctgtcagtaacgactggtgtccactccggacacattctgtggcatgatttttttaccgtgcctagagagctttccggttcaagtcaagtcctcgaagaaacacatccagcccatcaggttggcgcatctaggccgggccctcgggacgctcaactccacccagggagacctagggccgttcccactcagtgcgacgtgccagagaactcacgcttcgattgtgcacctgagaaggctatcacgcaagagcagtgcgaggcccgcggatgttgttacataccggctaaacaggggctgcagggtgcgcagatgggccaaccttggtgcttcttcccaccatcctatccgagttacaagctggagaatctctcccagtctgaaatgggatataccgcaacactgactcggaccaccccctccttctttcccaaagatatcttgactctgagacttgacgtaatgatggagacagaaaacaggctccactttaccattaaggaccctgccaatcgccgatacgaggtgcctctggaaacaccacacgtgcacagtagagctccatcacctctgtattctgtcgagttctccgaagagccgtttggcgttatcgtcaggaggcagctcgacgggcgagtgcttctgaacacgactgtggccccgttgttctttgcggatcagtttctgcaactgtcaacaagtctcccttctcagtacattaccgggcttgcagagcatctgtccccactcatgctgagtacttcatggaacaaaatcacactgtggaatagagaccttgctcctactccaggagccaacttgtatggttctcaccctttctacttggccctggaagatggcggatcagcgcatggcgtattcctcctgaattccaacgcaatggacgttgttcttcagccatctcctgctttgagttggagatctacaggcgggatactggacgtctacatctttctgggtccagagcctaaatccgtagtgcagcagtatcttgatgtcgtcggatacccgtttatgccaccatattggggcctggggttccacttgtgccgctggggatattcatccaccgccattacacgacaagttgttgagaatatgaccagggcacattttcctctggatgtacagtggaacgacctggactacatggatagtcgccgcgacttcaccttcaataaggatgggttcagagactttcctgctatggtccaagaacttcaccagggaggcaggaggtacatgatgatcgtagatccgggaatttcttcttctggcccagccggttcatacagaccgtatgacgaaggactgcgacgaggcgtctttatcacgaacgagactggtcagcctttgataggcaaggtttggccagggtccaccgctttcccggatttcacaaatcctgaggcactggcctggtgggaagatatggtcgccgagtttcacgaccaggtcccatttgacgggatgtggatcgacatgaacgagccatccaacttcattagaggaagtgtggatggctgtccgaataatgagctggaaaaccctccttacgtaccaggcgttgttggtgggactcttcaagctgcgacgatttgcgcatcctcccatcagttcctgtcaacccactataacttgcacaatctgtacgggacaacagaggctatcgccagtcatagggccctggtaaaagctagaggaacacgccctttcgttatctctcgctcaacttttgcaggccacggtaggtatgccggacattggaccggcgacgtctggagttcttgggaacagctggcttcctccgttccagagatattgcagtttaacctgttgggagtcccacttgtaggtgcagatgtttgtggcttcctggggaacacctcagaagaattgtgcgtaagatggactcaactgggcgccttctacccttttatgcgcaatcacaactcactgacatctttgcctcaagaaccgtactcatttagtgagccagcacagcaggccatgaggaaggctcttggcctgagatatgcacttctgccgcatctgtacacccttttccaccaggctcatgtccatggagagactgttgcacgacctctgttcttggagttcccaaaagactcttccacgtggacagtcgatcaccagatgctgtggggcgaggctctgctgattacacctgtattgcaacctggtaaggccgaagttaccgggtactttccattggggacctggtatgatctgcaaacagtcccggttgaagctcttggaagtcttccacctccacctgctgcaccaagggagcctgcgatccactctgaaggacagtgggtaactttgcctgcaccgctggacaccatcaatgtccatctgcgcgaaggctacatcataccacttcaaggtcctggactgaccactacagagtctagaaaacaaccaatggctcttgctgttgcactgactaaaagcggcgaagcaaggggtgagctgttctgggacgacggagagtcactggaggtactcgaacgaggcgcgtatacgcaggtcatttttgaggctcgcaataatacgatcgttaacgagctggtccacgtcacttcagaaggtgcaggccttcagttgggcaaggtaactgtcctgggagttgctacagcaccgcagcaggtcttgtccaacggacggcccgtaagcaactttacctatagtcctgataccaaagttctggacatctgcgttgctctgctgatgggtgagcagttcctggtatcatggtgc

SEQ ID NO: 262 - protein, 944 aa, synthetic construct
  REGION 1..944: note = Variant of the Homo Sapiens Lysosomal alpha-glucosidase
MEWSWVFLFFLSVTTGVHSGHILWHDFFTVPRELSGSSQVLEETHPAHQVGASRPGPRDAQLHPGRPRAVPTQCDVPENSRFDCAPEKAITQEQCEARGCCYIPAKQGLQGAQMGQPWCFFPPSYPSYKLENLSQSEMGYTATLTRTTPSFFPKDILTLRLDVMMETENRLHFTIKDPANRRYEVPLETPHVHSRAPSPLYSVEFSEEPFGVIVRRQLDGRVLLNTTVAPLFFADQFLQLSTSLPSQYITGLAEHLSPLMLSTSWNKITLWNRDLAPTPGANLYGSHPFYLALEDGGSAHGVFLLNSNAMDVVLQPSPALSWRSTGGILDVYIFLGPEPKSVVQQYLDVVGYPFMPPYWGLGFHLCRWGYSSTAITRQVVENMTRAHFPLDVQWNDLDYMDSRRDFTFNKDGFRDFPAMVQELHQGGRRYMMIVDPGISSSGPAGSYRPYDEGLRRGVFITNETGQPLIGKVWPGSTAFPDFTNPEALAWWEDMVAEFHDQVPFDGMWIDMNEPSNFIRGSVDGCPNNELENPPYVPGVVGGTLQAATICASSHQFLSTHYNLHNLYGTTEAIASHRALVKARGTRPFVISRSTFAGHGRYAGHWTGDVWSSWEQLASSVPEILQFNLLGVPLVGADVCGFLGNTSEELCVRWTQLGAFYPFMRNHNSLTSLPQEPYSFSEPAQQAMRKALGLRYALLPHLYTLFHQAHVHGETVARPLFLEFPKDSSTWTVDHQMLWGEALLITPVLQPGKAEVTGYFPLGTWYDLQTVPVEALGSLPPPPAAPREPAIHSEGQWVTLPAPLDTINVHLREGYIIPLQGPGLTTTESRKQPMALAVALTKSGEARGELFWDDGESLEVLERGAYTQVIFEARNNTIVNELVHVTSEGAGLQLGKVTVLGVATAPQQVLSNGRPVSNFTYSPDTKVLDICVALLMGEQFLVSWC

SEQ ID NO: 263 - DNA, 2832 bp, synthetic construct
  misc_feature 1..2832: note = Variant of the Homo Sapiens Lysosomal alpha-glucosidase
  source 1..2832: mol_type = other DNA
atggaatggagctgggtctttctcttcttcctgtcagtaacgactggtgtccactccggacacattctgtggcatgatttttctaccgtgcctagagagctttccggttcaagtcaagtcctcgaagaaacacatccagcccatcaggttggcgcatctaggccgggccctcgggacgctcaactccacccagggagacctagggccgttcccactcagtgcgacgtgccagagaactcacgcttcgattgtgcacctgagaaggctatcacgcaagagcagtgcgaggcccgcggatgttgttacataccggctaaacaggggctgcagggtgcgcagatgggccaaccttggtgcttcttcccaccatcctatccgagttacaagctggagaatctctcccagtctgaaatgggatataccgcaacactgactcggaccaccccctccttctttcccaaagatatcttgactctgagacttgacgtaatgatggagacagaaaacaggctccactttaccattaaggaccctgccaatcgccgatacgaggtgcctctggaaacaccacacgtgcacagtagagctccatcacctctgtattctgtcgagttctccgaagagccgtttggcgttatcgtcaggaggcagctcgacgggcgagtgcttctgaacacgactgtggccccgttgttctttgcggatcagtttctgcaactgtcaacaagtctcccttctcagtacattaccgggcttgcagagcatctgtccccactcatgctgagtacttcatggaacaaaatcacactgtggaatagagaccttgctcctactccaggagccaacttgtatggttctcaccctttctacttggccctggaagatggcggatcagcgcatggcgtattcctcctgaattccaacgcaatggacgttgttcttcagccatctcctgctttgagttggagatctacaggcgggatactggacgtctacatctttctgggtccagagcctaaatccgtagtgcagcagtatcttgatgtcgtcggatacccgtttatgccaccatattggggcctggggttccacttgtgccgctggggatattcatccaccgccattacacgacaagttgttgagaatatgaccagggcacattttcctctggatgtacagtggaacgacctggactacatggatagtcgccgcgacttcaccttcaataaggatgggttcagagactttcctgctatggtccaagaacttcaccagggaggcaggaggtacatgatgatcgtagatccgggaatttcttcttctggcccagccggttcatacagaccgtatgacgaaggactgcgacgaggcgtctttatcacgaacgagactggtcagcctttgataggcaaggtttggccagggtccaccgctttcccggatttcacaaatcctgaggcactggcctggtgggaagatatggtcgccgagtttcacgaccaggtcccatttgacgggatgtggatcgacatgaacgagccatccaacttcattagaggaagtgtggatggctgtccgaataatgagctggaaaaccctccttacgtaccaggcgttgttggtgggactcttcaagctgcgacgatttgcgcatcctcccatcagttcctgtcaacccactataacttgcacaatctgtacgggtctacagaggctatcgccagtcatagggccctggtaaaagctagaggaacacgccctttcgttatctctcgctcaacttttgcaggccacggtaggtatgccggacattggaccggcgacgtctggagttcttgggaacagctggcttcctccgttccagagatattgcagtttaacctgttgggagtcccacttgtaggtgcagatgtttgtggcttcctggggaacacctcagaagaattgtgcgtaagatggactcaactgggcgccttctacccttttatgcgcaatcacaactcactgacatctttgcctcaagaaccgtactcatttagtgagccagcacagcaggccatgaggaaggctcttggcctgagatatgcacttctgccgcatctgtacacccttttccaccaggctcatgtccatggagagactgttgcacgacctctgttcttggagttcccaaaagactcttccacgtggacagtcgatcaccagatgctgtggggcgaggctctgctgattacacctgtattgcaacctggtaaggccgaagttaccgggtactttccattggggacctggtatgatctgcaaacagtcccggttgaagctcttggaagtcttccacctccacctgctgcaccaagggagcctgcgatccactctgaaggacagtgggtaactttgcctgcaccgctggacaccatcaatgtccatctgcgcgaaggctacatcataccacttcaaggtcctggactgaccactacagagtctagaaaacaaccaatggctcttgctgttgcactgactaaaagcggcgaagcaaggggtgagctgttctgggacgacggagagtcactggaggtactcgaacgaggcgcgtatacgcaggtcatttttgaggctcgcaataatacgatcgttaacgagctggtccacgtcacttcagaaggtgcaggccttcagttgggcaaggtaactgtcctgggagttgctacagcaccgcagcaggtcttgtccaacggacggcccgtaagcaactttacctatagtcctgataccaaagttctggacatctgcgttgctctgctgatgggtgagcagttcctggtatcatggtgc

SEQ ID NO: 264 - protein, 944 aa, synthetic construct
  REGION 1..944: note = Variant of the Homo Sapiens Lysosomal alpha-glucosidase
MEWSWVFLFFLSVTTGVHSGHILWHDFSTVPRELSGSSQVLEETHPAHQVGASRPGPRDAQLHPGRPRAVPTQCDVPENSRFDCAPEKAITQEQCEARGCCYIPAKQGLQGAQMGQPWCFFPPSYPSYKLENLSQSEMGYTATLTRTTPSFFPKDILTLRLDVMMETENRLHFTIKDPANRRYEVPLETPHVHSRAPSPLYSVEFSEEPFGVIVRRQLDGRVLLNTTVAPLFFADQFLQLSTSLPSQYITGLAEHLSPLMLSTSWNKITLWNRDLAPTPGANLYGSHPFYLALEDGGSAHGVFLLNSNAMDVVLQPSPALSWRSTGGILDVYIFLGPEPKSVVQQYLDVVGYPFMPPYWGLGFHLCRWGYSSTAITRQVVENMTRAHFPLDVQWNDLDYMDSRRDFTFNKDGFRDFPAMVQELHQGGRRYMMIVDPGISSSGPAGSYRPYDEGLRRGVFITNETGQPLIGKVWPGSTAFPDFTNPEALAWWEDMVAEFHDQVPFDGMWIDMNEPSNFIRGSVDGCPNNELENPPYVPGVVGGTLQAATICASSHQFLSTHYNLHNLYGSTEAIASHRALVKARGTRPFVISRSTFAGHGRYAGHWTGDVWSSWEQLASSVPEILQFNLLGVPLVGADVCGFLGNTSEELCVRWTQLGAFYPFMRNHNSLTSLPQEPYSFSEPAQQAMRKALGLRYALLPHLYTLFHQAHVHGETVARPLFLEFPKDSSTWTVDHQMLWGEALLITPVLQPGKAEVTGYFPLGTWYDLQTVPVEALGSLPPPPAAPREPAIHSEGQWVTLPAPLDTINVHLREGYIIPLQGPGLTTTESRKQPMALAVALTKSGEARGELFWDDGESLEVLERGAYTQVIFEARNNTIVNELVHVTSEGAGLQLGKVTVLGVATAPQQVLSNGRPVSNFTYSPDTKVLDICVALLMGEQFLVSWC

SEQ ID NO: 265 - DNA, 2832 bp, synthetic construct
  misc_feature 1..2832: note = Variant of the Homo Sapiens Lysosomal alpha-glucosidase
  source 1..2832: mol_type = other DNA
atggaatggagctgggtctttctcttcttcctgtcagtaacgactggtgtccactccggacacattctgtggcatgatttttctaccgtgcctagagagctttccggttcaagtcaagtcctcgaagaaacacatccagcccatcaggttggcgcatctaggccgggccctcgggacgctcaactccacccagggagacctagggccgttcccactcagtgcgacgtgccagagaactcacgcttcgattgtgcacctgagaaggctatcacgcaagagcagtgcgaggcccgcggatgttgttacataccggctaaacaggggctgcagggtgcgcagatgggccaaccttggtgcttcttcccaccatcctatccgagttacaagctggagaatctctcccagtctgaaatgggatataccgcaacactgactcggaccaccccctccttctttcccaaagatatcttgactctgagacttgacgtaatgatggagacagaaaacaggctccactttaccattaaggaccctgccaatcgccgatacgaggtgcctctggaaacaccacacgtgcacagtagagctccatcacctctgtattctgtcgagttctccgaagagccgtttggcgttatcgtcaggaggcagctcgacgggcgagtgcttctgaacacgactgtggccccgttgttctttgcggatcagtttctgcaactgtcaacaagtctcccttctcagtacattaccgggcttgcagagcatctgtccccactcatgctgagtacttcatggaacaaaatcacactgtggaatagagaccttgctcctactccaggagccaacttgtatggttctcaccctttctacttggccctggaagatggcggatcagcgcatggcgtattcctcctgaattccaacgcaatggacgttgttcttcagccatctcctgctttgagttggagatctacaggcgggatactggacgtctacatctttctgggtccagagcctaaatccgtagtgcagcagtatcttgatgtcgtcggatacccgtttatgccaccatattggggcctggggttccacttgtgccgctggggatattcatccaccgccattacacgacaagttgttgagaatatgaccagggcacattttcctctggatgtacagtggaacgacctggactacatggatagtcgccgcgacttcaccttcaataaggatgggttcagagactttcctgctatggtccaagaacttcaccagggaggcaggaggtacatgatgatcgtagatccgggaatttcttcttctggcccagccggttcatacagaccgtatgacgaaggactgcgacgaggcgtctttatcacgaacgagactggtcagcctttgataggcaaggtttggccagggtccaccgctttcccggatttcacaaatcctgaggcactggcctggtgggaagatatggtcgccgagtttcacgaccaggtcccatttgacgggatgtggatcgacatgaacgagccatccaacttcattagaggaagtgtggatggctgtccgaataatgagctggaaaaccctccttacgtaccaggcgttgttggtgggactcttcaagctgcgacgatttgcgcatcctcccatcagttcctgtcaacccactataacttgcacaatctgtacgggacaacagaggctatcgccagtcatagggccctggtaaaagctagaggaacacgccctttcgttatctctcgctcaacttttgcaggccacggtaggtatgccggacattggaccggcgacgtctggagttcttgggaacagctggcttcctccgttccagagatattgcagtttaacctgttgggagtcccacttgtaggtgcagatgtttgtggcttcctggggaacacctcagaagaattgtgcgtaagatggactcaactgggcgccttctacccttttatgcgcaatcacaactcactgacatctttgcctcaagaaccgtactcatttagtgagccagcacagcaggccatgaggaaggctcttggcctgagatatgcacttctgccgcatctgtacacccttttccaccaggctcatgtccatggagagactgttgcacgacctctgttcttggagttcccaaaagactcttccacgtggacagtcgatcaccagatgctgtggggcgaggctctgctgattacacctgtattgcaacctggtaaggccgaagttaccgggtactttccattggggacctggtatgatctgcaaacagtcccggttgaagctcttggaagtcttccacctccacctgctgcaccaagggagcctgcgatccactctgaaggacagtgggtaactttgcctgcaccgctggacaccatcaatgtccatctgcgcgaaggctacatcataccacttcaaggtcctggactgaccactacagagtctagaaaacaaccaatggctcttgctgttgcactgactaaaagcggcgaagcaaggggtgagctgttctgggacgacggagagtcactggaggtactcgaacgaggcgcgtatacgcaggtcatttttgaggctcgcaataatacgatcgttaacgagctggtccaggtcacttcagaaggtgcaggccttcagttgggcaaggtaactgtcctgggagttgctacagcaccgcagcaggtcttgtccaacggacggcccgtaagcaactttacctatagtcctgataccaaagttctggacatctgcgttgctctgctgatgggtgagcagttcctggtatcatggtgc

SEQ ID NO: 266 - protein, 944 aa, synthetic construct
  REGION 1..944: note = Variant of the Homo Sapiens Lysosomal alpha-glucosidase
MEWSWVFLFFLSVTTGVHSGHILWHDFSTVPRELSGSSQVLEETHPAHQVGASRPGPRDAQLHPGRPRAVPTQCDVPENSRFDCAPEKAITQEQCEARGCCYIPAKQGLQGAQMGQPWCFFPPSYPSYKLENLSQSEMGYTATLTRTTPSFFPKDILTLRLDVMMETENRLHFTIKDPANRRYEVPLETPHVHSRAPSPLYSVEFSEEPFGVIVRRQLDGRVLLNTTVAPLFFADQFLQLSTSLPSQYITGLAEHLSPLMLSTSWNKITLWNRDLAPTPGANLYGSHPFYLALEDGGSAHGVFLLNSNAMDVVLQPSPALSWRSTGGILDVYIFLGPEPKSVVQQYLDVVGYPFMPPYWGLGFHLCRWGYSSTAITRQVVENMTRAHFPLDVQWNDLDYMDSRRDFTFNKDGFRDFPAMVQELHQGGRRYMMIVDPGISSSGPAGSYRPYDEGLRRGVFITNETGQPLIGKVWPGSTAFPDFTNPEALAWWEDMVAEFHDQVPFDGMWIDMNEPSNFIRGSVDGCPNNELENPPYVPGVVGGTLQAATICASSHQFLSTHYNLHNLYGTTEAIASHRALVKARGTRPFVISRSTFAGHGRYAGHWTGDVWSSWEQLASSVPEILQFNLLGVPLVGADVCGFLGNTSEELCVRWTQLGAFYPFMRNHNSLTSLPQEPYSFSEPAQQAMRKALGLRYALLPHLYTLFHQAHVHGETVARPLFLEFPKDSSTWTVDHQMLWGEALLITPVLQPGKAEVTGYFPLGTWYDLQTVPVEALGSLPPPPAAPREPAIHSEGQWVTLPAPLDTINVHLREGYIIPLQGPGLTTTESRKQPMALAVALTKSGEARGELFWDDGESLEVLERGAYTQVIFEARNNTIVNELVQVTSEGAGLQLGKVTVLGVATAPQQVLSNGRPVSNFTYSPDTKVLDICVALLMGEQFLVSWC

SEQ ID NO: 267 - DNA, 2832 bp, synthetic construct
  misc_feature 1..2832: note = Variant of the Homo Sapiens Lysosomal alpha-glucosidase
  source 1..2832: mol_type = other DNA
atggaatggagctgggtctttctcttcttcctgtcagtaacgactggtgtccactccggacacattctgtggcatgatttttctaccgtgcctagagagctttccggttcaagtcaagtcctcgaagaaacacatccagcccatcagtttggcgcatctaggccgggccctcgggacgctcaactccacccagggagacctagggccgttcccactcagtgcgacgtgccagagaactcacgcttcgattgtgcacctgagaaggctatcacgcaagagcagtgcgaggcccgcggatgttgttacataccggctaaacaggggctgcagggtgcgcagatgggccaaccttggtgcttcttcccaccatcctatccgagttacaagctggagaatctctcccagtctgaaatgggatataccgcaacactgactcggaccaccccctccttctttcccaaagatatcttgactctgagacttgacgtaatgatggagacagaaaacaggctccactttaccattaaggaccctgccaatcgccgatacgaggtgcctctggaaacaccacacgtgcacagtagagctccatcacctctgtattctgtcgagttctccgaagagccgtttggcgttatcgtcaggaggcagctcgacgggcgagtgcttctgaacacgactgtggccccgttgttctttgcggatcagtttctgcaactgtcaacaagtctcccttctcagtacattaccgggcttgcagagcatctgtccccactcatgctgagtacttcatggaacaaaatcacactgtggaatagagaccttgctcctactccaggagccaacttgtatggttctcaccctttctacttggccctggaagatggcggatcagcgcatggcgtattcctcctgaattccaacgcaatggacgttgttcttcagccatctcctgctttgagttggagatctacaggcgggatactggacgtctacatctttctgggtccagagcctaaatccgtagtgcagcagtatcttgatgtcgtcggatacccgtttatgccaccatattggggcctggggttccacttgtgccgctggggatattcatccaccgccattacacgacaagttgttgagaatatgaccagggcacattttcctctggatgtacagtggaacgacctggactacatggatagtcgccgcgacttcaccttcaataaggatgggttcagagactttcctgctatggtccaagaacttcaccagggaggcaggaggtacatgatgatcgtagatccgggaatttcttcttctggcccagccggttcatacagaccgtatgacgaaggactgcgacgaggcgtctttatcacgaacgagactggtcagcctttgataggcaaggtttggccagggtccaccgctttcccggatttcacaaatcctgaggcactggcctggtgggaagatatggtcgccgagtttcacgaccaggtcccatttgacgggatgtggatcgacatgaacgagccatccaacttcattagaggaagtgtggatggctgtccgaataatgagctggaaaaccctccttacgtaccaggcgttgttggtgggactcttcaagctgcgacgatttgcgcatcctcccatcagttcctgtcaacccactataacttgcacaatctgtacgggacaacagaggctatcgccagtcatagggccctggtaaaagctagaggaacacgccctttcgttatctctcgctcaacttttgcaggccacggtaggtatgccggacattggaccggcgacgtctggagttcttgggaacagctggcttcctccgttccagagatattgcagtttaacctgttgggagtcccacttgtaggtgcagatgtttgtggcttcctggggaacacctcagaagaattgtgcgtaagatggactcaactgggcgccttctacccttttatgcgcaatcacaactcactgacatctttgcctcaagaaccgtactcatttagtgagccagcacagcaggccatgaggaaggctcttggcctgagatatgcacttctgccgcatctgtacacccttttccaccaggctcatgtccatggagagactgttgcacgacctctgttcttggagttcccaaaagactcttccacgtggacagtcgatcaccagatgctgtggggcgaggctctgctgattacacctgtattgcaacctggtaaggccgaagttaccgggtactttccattggggacctggtatgatctgcaaacagtcccggttgaagctcttggaagtcttccacctccacctgctgcaccaagggagcctgcgatccactctgaaggacagtgggtaactttgcctgcaccgctggacaccatcaatgtccatctgcgcgaaggctacatcataccacttcaaggtcctggactgaccactacagagtctagaaaacaaccaatggctcttgctgttgcactgactaaaagcggcgaagcaaggggtgagctgttctgggacgacggagagtcactggaggtactcgaacgaggcgcgtatacgcaggtcatttttgaggctcgcaataatacgatcgttaacgagctggtccacgtcacttcagaaggtgcaggccttcagttgggcaaggtaactgtcctgggagttgctacagcaccgcagcaggtcttgtccaacggacggcccgtaagcaactttacctatagtcctgataccaaagttctggacatctgcgttgctctgctgatgggtgagcagttcctggtatcatggtgc

SEQ ID NO: 268 - protein, 944 aa, synthetic construct
  REGION 1..944: note = Variant of the Homo Sapiens Lysosomal alpha-glucosidase
MEWSWVFLFFLSVTTGVHSGHILWHDFSTVPRELSGSSQVLEETHPAHQFGASRPGPRDAQLHPGRPRAVPTQCDVPENSRFDCAPEKAITQEQCEARGCCYIPAKQGLQGAQMGQPWCFFPPSYPSYKLENLSQSEMGYTATLTRTTPSFFPKDILTLRLDVMMETENRLHFTIKDPANRRYEVPLETPHVHSRAPSPLYSVEFSEEPFGVIVRRQLDGRVLLNTTVAPLFFADQFLQLSTSLPSQYITGLAEHLSPLMLSTSWNKITLWNRDLAPTPGANLYGSHPFYLALEDGGSAHGVFLLNSNAMDVVLQPSPALSWRSTGGILDVYIFLGPEPKSVVQQYLDVVGYPFMPPYWGLGFHLCRWGYSSTAITRQVVENMTRAHFPLDVQWNDLDYMDSRRDFTFNKDGFRDFPAMVQELHQGGRRYMMIVDPGISSSGPAGSYRPYDEGLRRGVFITNETGQPLIGKVWPGSTAFPDFTNPEALAWWEDMVAEFHDQVPFDGMWIDMNEPSNFIRGSVDGCPNNELENPPYVPGVVGGTLQAATICASSHQFLSTHYNLHNLYGTTEAIASHRALVKARGTRPFVISRSTFAGHGRYAGHWTGDVWSSWEQLASSVPEILQFNLLGVPLVGADVCGFLGNTSEELCVRWTQLGAFYPFMRNHNSLTSLPQEPYSFSEPAQQAMRKALGLRYALLPHLYTLFHQAHVHGETVARPLFLEFPKDSSTWTVDHQMLWGEALLITPVLQPGKAEVTGYFPLGTWYDLQTVPVEALGSLPPPPAAPREPAIHSEGQWVTLPAPLDTINVHLREGYIIPLQGPGLTTTESRKQPMALAVALTKSGEARGELFWDDGESLEVLERGAYTQVIFEARNNTIVNELVHVTSEGAGLQLGKVTVLGVATAPQQVLSNGRPVSNFTYSPDTKVLDICVALLMGEQFLVSWC

SEQ ID NO: 269 - DNA, 2832 bp, synthetic construct
  misc_feature 1..2832: note = Variant of the Homo Sapiens Lysosomal alpha-glucosidase
  source 1..2832: mol_type = other DNA
atggaatggagctgggtctttctcttcttcctgtcagtaacgactggtgtccactccggacacattctgtggcatgatttttggaccgtgcctagagagctttccggttcaagtcaagtcctcgaagaaacacatccagcccatcaggttggcgcatctaggccgggccctcgggacgctcaactccacccagggagacctagggccgttcccactcagtgcgacgtgccagagaactcacgcttcgattgtgcacctgagaaggctatcacgcaagagcagtgcgaggcccgcggatgttgttacataccggctaaacaggggctgcagggtgcgcagatgggccaaccttggtgcttcttcccaccatcctatccgagttacaagctggagaatctctcccagtctgaaatgggatataccgcaacactgactcggaccaccccctccttctttcccaaagatatcttgactctgagacttgacgtaatgatggagacagaaaacaggctccactttaccattaaggaccctgccaatcgccgatacgaggtgcctctggaaacaccacacgtgcacagtagagctccatcacctctgtattctgtcgagttctccgaagagccgtttggcgttatcgtcaggaggcagctcgacgggcgagtgcttctgaacacgactgtggccccgttgttctttgcggatcagtttctgcaactgtcaacaagtctcccttctcagtacattaccgggcttgcagagcatctgtccccactcatgctgagtacttcatggaacaaaatcacactgtggaatagagaccttgctcctactccaggagccaacttgtatggttctcaccctttctacttggccctggaagatggcggatcagcgcatggcgtattcctcctgaattccaacgcaatggacgttgttcttcagccatctcctgctttgagttggagatctacaggcgggatactggacgtctacatctttctgggtccagagcctaaatccgtagtgcagcagtatcttgatgtcgtcggatacccgtttatgccaccatattggggcctggggttccacttgtgccgctggggatattcatccaccgccattacacgacaagttgttgagaatatgaccagggcacattttcctctggatgtacagtggaacgacctggactacatggatagtcgccgcgacttcaccttcaataaggatgggttcagagactttcctgctatggtccaagaacttcaccagggaggcaggaggtacatgatgatcgtagatccgggaatttcttcttctggcccagccggttcatacagaccgtatgacgaaggactgcgacgaggcgtctttatcacgaacgagactggtcagcctttgataggcaaggtttggccagggtccaccgctttcccggatttcacaaatcctgaggcactggcctggtgggaagatatggtcgccgagtttcacgaccaggtcccatttgacgggatgtggatcgacatgaacgagccatccaacttcattagaggaagtgtggatggctgtccgaataatgagctggaaaaccctccttacgtaccaggcgttgttggtgggactcttcaagctgcgacgatttgcgcatcctcccatcagttcctgtcaacccactataacttgcacaatctgtacgggacaacagaggctatcgccagtcatagggccctggtaaaagctagaggaacacgccctttcgttatctctcgctcaacttttgcaggccacggtaggtatgccggacattggaccggcgacgtctggagttcttgggaacagctggcttcctccgttccagagatattgcagtttaacctgttgggagtcccacttgtaggtgcagatgtttgtggcttcctggggaacacctcagaagaattgtgcgtaagatggactcaactgggcgccttctacccttttatgcgcaatcacaactcactgacatctttgcctcaagaaccgtactcatttagtgagccagcacagcaggccatgaggaaggctcttggcctgagatatgcacttctgccgcatctgtacacccttttccaccaggctcatgtccatggagagactgttgcacgacctctgttcttggagttcccaaaagactcttccacgtggacagtcgatcaccagatgctgtggggcgaggctctgctgattacacctgtattgcaacctggtaaggccgaagttaccgggtactttccattggggacctggtatgatctgcaaacagtcccggttgaagctcttggaagtcttccacctccacctgctgcaccaagggagcctgcgatccactctgaaggacagtgggtaactttgcctgcaccgctggacaccatcaatgtccatctgcgcgaaggctacatcataccacttcaaggtcctggactgaccactacagagtctagaaaacaaccaatggctcttgctgttgcactgactaaaagcggcgaagcaaggggtgagctgttctgggacgacggagagtcactggaggtactcgaacgaggcgcgtatacgcaggtcatttttgaggctcgcaataatacgatcgttaacgagctggtccacgtcacttcagaaggtgcaggccttcagttgggcaaggtaactgtcctgggagttgctacagcaccgcagcaggtcttgtccaacggacggcccgtaagcaactttacctatagtcctgataccaaagttctggacatctgcgttgctctgctgatgggtgagcagttcctggtatcatggtgc

SEQ ID NO: 270 - protein, 944 aa, synthetic construct
  REGION 1..944: note = Variant of the Homo Sapiens Lysosomal alpha-glucosidase
MEWSWVFLFFLSVTTGVHSGHILWHDFWTVPRELSGSSQVLEETHPAHQVGASRPGPRDAQLHPGRPRAVPTQCDVPENSRFDCAPEKAITQEQCEARGCCYIPAKQGLQGAQMGQPWCFFPPSYPSYKLENLSQSEMGYTATLTRTTPSFFPKDILTLRLDVMMETENRLHFTIKDPANRRYEVPLETPHVHSRAPSPLYSVEFSEEPFGVIVRRQLDGRVLLNTTVAPLFFADQFLQLSTSLPSQYITGLAEHLSPLMLSTSWNKITLWNRDLAPTPGANLYGSHPFYLALEDGGSAHGVFLLNSNAMDVVLQPSPALSWRSTGGILDVYIFLGPEPKSVVQQYLDVVGYPFMPPYWGLGFHLCRWGYSSTAITRQVVENMTRAHFPLDVQWNDLDYMDSRRDFTFNKDGFRDFPAMVQELHQGGRRYMMIVDPGISSSGPAGSYRPYDEGLRRGVFITNETGQPLIGKVWPGSTAFPDFTNPEALAWWEDMVAEFHDQVPFDGMWIDMNEPSNFIRGSVDGCPNNELENPPYVPGVVGGTLQAATICASSHQFLSTHYNLHNLYGTTEAIASHRALVKARGTRPFVISRSTFAGHGRYAGHWTGDVWSSWEQLASSVPEILQFNLLGVPLVGADVCGFLGNTSEELCVRWTQLGAFYPFMRNHNSLTSLPQEPYSFSEPAQQAMRKALGLRYALLPHLYTLFHQAHVHGETVARPLFLEFPKDSSTWTVDHQMLWGEALLITPVLQPGKAEVTGYFPLGTWYDLQTVPVEALGSLPPPPAAPREPAIHSEGQWVTLPAPLDTINVHLREGYIIPLQGPGLTTTESRKQPMALAVALTKSGEARGELFWDDGESLEVLERGAYTQVIFEARNNTIVNELVHVTSEGAGLQLGKVTVLGVATAPQQVLSNGRPVSNFTYSPDTKVLDICVALLMGEQFLVSWC

SEQ ID NO: 271 - DNA, 2832 bp, synthetic construct
  misc_feature 1..2832: note = Variant of the Homo Sapiens Lysosomal alpha-glucosidase
  source 1..2832: mol_type = other DNA
atggaatggagctgggtctttctcttcttcctgtcagtaacgactggtgtccactccggacacattctgtggcatgatttttctaccgtgcctagagagctttccggttcaagtcaagtcctcgaagaaacacatccagcccatcaggttggcgcatctaggccgggccctcgggacgctcaactccacccagggagacctagggccgttcccactcagtgcgacgtgccagagaactcacgcttcgattgtgcacctgagaaggctatcacgcaagagcagtgcgaggcccgcggatgttgttacataccggctaaacaggggctgcagggtgcgcagatgggccaaccttggtgcttcttcccaccatcctatccgagttacaagctggagaatctctcccagtctgaaatgggatataccgcaacactgactcggaccaccccctccttctttcccaaagatatcttgactctgagacttgacgtaatgatggagacagaaaacaggctccactttaccattaaggaccctgccaatcgccgatacgaggtgcctctggaaacaccacacgtgcacagtagagctccatcacctctgtattctgtcgagttctccgaagagccgtttggcgttatcgtcaggaggcagctcgacgggcgagtgcttctgaacacgactgtggccccgttgttctttgcggatcagtttctgcaactgtcaacaagtctcccttctcagtacattaccgggcttgcagagcatctgtccccactcatgctgagtacttcatggaacgttatcacactgtggaatagagaccttgctcctactccaggagccaacttgtatggttctcaccctttctacttggccctggaagatggcggatcagcgcatggcgtattcctcctgaattccaacgcaatggacgttgttcttcagccatctcctgctttgagttggagatctacaggcgggatactggacgtctacatctttctgggtccagagcctaaatccgtagtgcagcagtatcttgatgtcgtcggatacccgtttatgccaccatattggggcctggggttccacttgtgccgctggggatattcatccaccgccattacacgacaagttgttgagaatatgaccagggcacattttcctctggatgtacagtggaacgacctggactacatggatagtcgccgcgacttcaccttcaataaggatgggttcagagactttcctgctatggtccaagaacttcaccagggaggcaggaggtacatgatgatcgtagatccgggaatttcttcttctggcccagccggttcatacagaccgtatgacgaaggactgcgacgaggcgtctttatcacgaacgagactggtcagcctttgataggcaaggtttggccagggtccaccgctttcccggatttcacaaatcctgaggcactggcctggtgggaagatatggtcgccgagtttcacgaccaggtcccatttgacgggatgtggatcgacatgaacgagccatccaacttcattagaggaagtgtggatggctgtccgaataatgagctggaaaaccctccttacgtaccaggcgttgttggtgggactcttcaagctgcgacgatttgcgcatcctcccatcagttcctgtcaacccactataacttgcacaatctgtacgggacaacagaggctatcgccagtcatagggccctggtaaaagctagaggaacacgccctttcgttatctctcgctcaacttttgcaggccacggtaggtatgccggacattggaccggcgacgtctggagttcttgggaacagctggcttcctccgttccagagatattgcagtttaacctgttgggagtcccacttgtaggtgcagatgtttgtggcttcctggggaacacctcagaagaattgtgcgtaagatggactcaactgggcgccttctacccttttatgcgcaatcacaactcactgacatctttgcctcaagaaccgtactcatttagtgagccagcacagcaggccatgaggaaggctcttggcctgagatatgcacttctgccgcatctgtacacccttttccaccaggctcatgtccatggagagactgttgcacgacctctgttcttggagttcccaaaagactcttccacgtggacagtcgatcaccagatgctgtggggcgaggctctgctgattacacctgtattgcaacctggtaaggccgaagttaccgggtactttccattggggacctggtatgatctgcaaacagtcccggttgaagctcttggaagtcttccacctccacctgctgcaccaagggagcctgcgatccactctgaaggacagtgggtaactttgcctgcaccgctggacaccatcaatgtccatctgcgcgaaggctacatcataccacttcaaggtcctggactgaccactacagagtctagaaaacaaccaatggctcttgctgttgcactgactaaaagcggcgaagcaaggggtgagctgttctgggacgacggagagtcactggaggtactcgaacgaggcgcgtatacgcaggtcatttttgaggctcgcaataatacgatcgttaacgagctggtccacgtcacttcagaaggtgcaggccttcagttgggcaaggtaactgtcctgggagttgctacagcaccgcagcaggtcttgtccaacggacggcccgtaagcaactttacctatagtcctgataccaaagttctggacatctgcgttgctctgctgatgggtgagcagttcctggtatcatggtgc

SEQ ID NO: 272 - protein, 944 aa, synthetic construct
  REGION 1..944: note = Variant of the Homo Sapiens Lysosomal alpha-glucosidase
MEWSWVFLFFLSVTTGVHSGHILWHDFSTVPRELSGSSQVLEETHPAHQVGASRPGPRDAQLHPGRPRAVPTQCDVPENSRFDCAPEKAITQEQCEARGCCYIPAKQGLQGAQMGQPWCFFPPSYPSYKLENLSQSEMGYTATLTRTTPSFFPKDILTLRLDVMMETENRLHFTIKDPANRRYEVPLETPHVHSRAPSPLYSVEFSEEPFGVIVRRQLDGRVLLNTTVAPLFFADQFLQLSTSLPSQYITGLAEHLSPLMLSTSWNVITLWNRDLAPTPGANLYGSHPFYLALEDGGSAHGVFLLNSNAMDVVLQPSPALSWRSTGGILDVYIFLGPEPKSVVQQYLDVVGYPFMPPYWGLGFHLCRWGYSSTAITRQVVENMTRAHFPLDVQWNDLDYMDSRRDFTFNKDGFRDFPAMVQELHQGGRRYMMIVDPGISSSGPAGSYRPYDEGLRRGVFITNETGQPLIGKVWPGSTAFPDFTNPEALAWWEDMVAEFHDQVPFDGMWIDMNEPSNFIRGSVDGCPNNELENPPYVPGVVGGTLQAATICASSHQFLSTHYNLHNLYGTTEAIASHRALVKARGTRPFVISRSTFAGHGRYAGHWTGDVWSSWEQLASSVPEILQFNLLGVPLVGADVCGFLGNTSEELCVRWTQLGAFYPFMRNHNSLTSLPQEPYSFSEPAQQAMRKALGLRYALLPHLYTLFHQAHVHGETVARPLFLEFPKDSSTWTVDHQMLWGEALLITPVLQPGKAEVTGYFPLGTWYDLQTVPVEALGSLPPPPAAPREPAIHSEGQWVTLPAPLDTINVHLREGYIIPLQGPGLTTTESRKQPMALAVALTKSGEARGELFWDDGESLEVLERGAYTQVIFEARNNTIVNELVHVTSEGAGLQLGKVTVLGVATAPQQVLSNGRPVSNFTYSPDTKVLDICVALLMGEQFLVSWC

SEQ ID NO: 273 - DNA, 2832 bp, synthetic construct
  misc_feature 1..2832: note = Variant of the Homo Sapiens Lysosomal alpha-glucosidase
  source 1..2832: mol_type = other DNA
atggaatggagctgggtctttctcttcttcctgtcagtaacgactggtgtccactccggacacattctgtggcatgatttttctaccgtgcctagagagctttccggttcaagtcaagtcctcgaagaaacacatccagcccatcaggttggcgcatctaggccgggccctcgggacgctcaactccacccagggagacctagggccgttcccactcagtgcgacgtgccagagaactcacgcttcgattgtgcacctgagaaggctatcacgcaagagcagtgcgaggcccgcggatgttgttacataccggctaaacaggggctgcagggtgcgcagatgggccaaccttggtgcttcttcccaccatcctatccgagttacaagctggagaatctctcccagtctgaaatgggatataccgcaacactgactcggaccaccccctccttctttcccaaagatatcttgactctgagacttgacgtaatgatggagacagaaaacaggctccactttaccattaaggaccctgccaatcgccgatacgaggtgcctctggaaacaccacacgtgcacagtagagctccatcacctctgtattctgtcgagttctccgaagagccgtttggcgttatcgtcaggaggcagctcgacgggcgagtgcttctgaacacgactgtggccccgttgttctttgcggatcagtttctgcaactgtcaacaagtctcccttctcagtacattaccgggcttgcagagcatctgtccccactcatgctgagtacttcatggaacaaaatcacactgtggaatagagaccttgctcctactccaggagccaacttgtatggttctcaccctttctacttggccctggaagatggcggatcagcgcatggcgtattcctcctgaattccaacgcaatggacgttgttcttcagccatctcctgctttgagttggagatctacaggcgggatactggacgtctacatctttctgggtccagagcctaaatccgtagtgcagcagtatcttgatgtcgtcggatacccgtttatgccaccatattggggcctggggttccacttgtgccgctggggatattcatccaccgccattacacgacaagttgttgagaatatgaccagggcacattttcctctggatgtacagtggaacgacctggactacatggatagtcgccgcgacttcaccttcaataaggatgggttcagagactttcctgctatggtccaagaacttcaccagggaggcaggaggtacatgatgatcgtagatccgggaatttcttcttctggcccagccggttcatacagaccgtatgacgaaggactgcgacgaggcgtctttatcacgaacgagactggtcagcctttgataggcaaggtttggccagggtccaccgctttcccggatttcacaaatcctgaggcactggcctggtgggaagatatggtcgccgagtttcacgaccaggtcccatttgacgggatgtggatcgacatgaacgagccatccaacttcattagaggaagtgtggatggctgtccgaataatgagctggaaaaccctccttacgtaccaggcgttgttggtgggactcttcaagctgcgacgatttgcgcatcctcccatcagttcctgtcaacccactataacttgcacaatctgtacgggacaacagaggctatcgccagtcatagggccctggtaaaagctagaggaacacgccctttcgttatctctcgctcaacttttgcaggccacggtaggtatgccggacattggaccggcgacgtctggagttcttgggaacagctggcttcctccgttccagagatattgcagtttaacctgttgggagtcccacttgtaggtgcagatgtttgtggcttcctggggaacacctcagaagaattgtgcgtaagatggactcaactgggcgccttctacccttttatgcgcaatcacaactcactgacatctttgcctcaagaaccgtactcatttagtgagccagcacagcaggccatgaggaaggctcttggcctgagatatgcacttctgccgcatctgtacacccttttccaccaggctcatgtccatggagagactgttgcacgacctctgttcttggagttcccaaaagactcttccacgtggacagtcgatcaccagatgctgtggggcgaggctctgctgattacacctgtattgcaacctggtaaggccgaagttaccgggtactttccattggggacctggtatgatctgcaaacagtcccggttgaagctcttggaagtcttccacctccacctgctgcaccaagggagcctgcgatccactctgaaggacagtgggtaactttgcctgcaccgctggacaccatcaatgtccatctgcgcgaaggctacatcataccacttcaaggtcctggactgaccactacagagtctagagagcaaccaatggctcttgctgttgcactgactaaaagcggcgaagcaaggggtgagctgttctgggacgacggagagtcactggaggtactcgaacgaggcgcgtatacgcaggtcatttttgaggctcgcaataatacgatcgttaacgagctggtccacgtcacttcagaaggtgcaggccttcagttgggcaaggtaactgtcctgggagttgctacagcaccgcagcaggtcttgtccaacggacggcccgtaagcaactttacctatagtcctgataccaaagttctggacatctgcgttgctctgctgatgggtgagcagttcctggtatcatggtgc

SEQ ID NO: 274 - protein, 944 aa, synthetic construct
  REGION 1..944: note = Variant of the Homo Sapiens Lysosomal alpha-glucosidase
MEWSWVFLFFLSVTTGVHSGHILWHDFSTVPRELSGSSQVLEETHPAHQVGASRPGPRDAQLHPGRPRAVPTQCDVPENSRFDCAPEKAITQEQCEARGCCYIPAKQGLQGAQMGQPWCFFPPSYPSYKLENLSQSEMGYTATLTRTTPSFFPKDILTLRLDVMMETENRLHFTIKDPANRRYEVPLETPHVHSRAPSPLYSVEFSEEPFGVIVRRQLDGRVLLNTTVAPLFFADQFLQLSTSLPSQYITGLAEHLSPLMLSTSWNKITLWNRDLAPTPGANLYGSHPFYLALEDGGSAHGVFLLNSNAMDVVLQPSPALSWRSTGGILDVYIFLGPEPKSVVQQYLDVVGYPFMPPYWGLGFHLCRWGYSSTAITRQVVENMTRAHFPLDVQWNDLDYMDSRRDFTFNKDGFRDFPAMVQELHQGGRRYMMIVDPGISSSGPAGSYRPYDEGLRRGVFITNETGQPLIGKVWPGSTAFPDFTNPEALAWWEDMVAEFHDQVPFDGMWIDMNEPSNFIRGSVDGCPNNELENPPYVPGVVGGTLQAATICASSHQFLSTHYNLHNLYGTTEAIASHRALVKARGTRPFVISRSTFAGHGRYAGHWTGDVWSSWEQLASSVPEILQFNLLGVPLVGADVCGFLGNTSEELCVRWTQLGAFYPFMRNHNSLTSLPQEPYSFSEPAQQAMRKALGLRYALLPHLYTLFHQAHVHGETVARPLFLEFPKDSSTWTVDHQMLWGEALLITPVLQPGKAEVTGYFPLGTWYDLQTVPVEALGSLPPPPAAPREPAIHSEGQWVTLPAPLDTINVHLREGYIIPLQGPGLTTTESREQPMALAVALTKSGEARGELFWDDGESLEVLERGAYTQVIFEARNNTIVNELVHVTSEGAGLQLGKVTVLGVATAPQQVLSNGRPVSNFTYSPDTKVLDICVALLMGEQFLVSWC

SEQ ID NO: 275 - DNA, 2832 bp, synthetic construct
  misc_feature 1..2832: note = Variant of the Homo Sapiens Lysosomal alpha-glucosidase
  source 1..2832: mol_type = other DNA
atggaatggagctgggtctttctcttcttcctgtcagtaacgactggtgtccactccggacacattctgtggcatgatttttctaccgtgcctagagagctttccggttcaagtcaagtcctcgaagaaacacatccagcccatcaggttggcgcatctaggccgggccctcgggacgctcaagagcacccagggagacctagggccgttcccactcagtgcgacgtgccagagaactcacgcttcgattgtgcacctgagaaggctatcacgcaagagcagtgcgaggcccgcggatgttgttacataccggctaaacaggggctgcagggtgcgcagatgggccaaccttggtgcttcttcccaccatcctatccgagttacaagctggagaatctctcccagtctgaaatgggatataccgcaacactgactcggaccaccccctccttctttcccaaagatatcttgactctgagacttgacgtaatgatggagacagaaaacaggctccactttaccattaaggaccctgccaatcgccgatacgaggtgcctctggaaacaccacacgtgcacagtagagctccatcacctctgtattctgtcgagttctccgaagagccgtttggcgttatcgtcaggaggcagctcgacgggcgagtgcttctgaacacgactgtggccccgttgttctttgcggatcagtttctgcaactgtcaacaagtctcccttctcagtacattaccgggcttgcagagcatctgtccccactcatgctgagtacttcatggaacaaaatcacactgtggaatagagaccttgctcctactccaggagccaacttgtatggttctcaccctttctacttggccctggaagatggcggatcagcgcatggcgtattcctcctgaattccaacgcaatggacgttgttcttcagccatctcctgctttgagttggagatctacaggcgggatactggacgtctacatctttctgggtccagagcctaaatccgtagtgcagcagtatcttgatgtcgtcggatacccgtttatgccaccatattggggcctggggttccacttgtgccgctggggatattcatccaccgccattacacgacaagttgttgagaatatgaccagggcacattttcctctggatgtacagtggaacgacctggactacatggatagtcgccgcgacttcaccttcaataaggatgggttcagagactttcctgctatggtccaagaacttcaccagggaggcaggaggtacatgatgatcgtagatccgggaatttcttcttctggcccagccggttcatacagaccgtatgacgaaggactgcgacgaggcgtctttatcacgaacgagactggtcagcctttgataggcaaggtttggccagggtccaccgctttcccggatttcacaaatcctgaggcactggcctggtgggaagatatggtcgccgagtttcacgaccaggtcccatttgacgggatgtggatcgacatgaacgagccatccaacttcattagaggaagtgtggatggctgtccgaataatgagctggaaaaccctccttacgtaccaggcgttgttggtgggactcttcaagctgcgacgatttgcgcatcctcccatcagttcctgtcaacccactataacttgcacaatctgtacgggacaacagaggctatcgccagtcatagggccctggtaaaagctagaggaacacgccctttcgttatctctcgctcaacttttgcaggccacggtaggtatgccggacattggaccggcgacgtctggagttcttgggaacagctggcttcctccgttccagagatattgcagtttaacctgttgggagtcccacttgtaggtgcagatgtttgtggcttcctggggaacacctcagaagaattgtgcgtaagatggactcaactgggcgccttctacccttttatgcgcaatcacaactcactgacatctttgcctcaagaaccgtactcatttagtgagccagcacagcaggccatgaggaaggctcttggcctgagatatgcacttctgccgcatctgtacacccttttccaccaggctcatgtccatggagagactgttgcacgacctctgttcttggagttcccaaaagactcttccacgtggacagtcgatcaccagatgctgtggggcgaggctctgctgattacacctgtattgcaacctggtaaggccgaagttaccgggtactttccattggggacctggtatgatctgcaaacagtcccggttgaagctcttggaagtcttccacctccacctgctgcaccaagggagcctgcgatccactctgaaggacagtgggtaactttgcctgcaccgctggacaccatcaatgtccatctgcgcgaaggctacatcataccacttcaaggtcctggactgaccactacagagtctagaaaacaaccaatggctcttgctgttgcactgactaaaagcggcgaagcaaggggtgagctgttctgggacgacggagagtcactggaggtactcgaacgaggcgcgtatacgcaggtcatttttgaggctcgcaataatacgatcgttaacgagctggtccacgtcacttcagaaggtgcaggccttcagttgggcaaggtaactgtcctgggagttgctacagcaccgcagcaggtcttgtccaacggacggcccgtaagcaactttacctatagtcctgataccaaagttctggacatctgcgttgctctgctgatgggtgagcagttcctggtatcatggtgc

SEQ ID NO: 276 - protein, 944 aa, synthetic construct
  REGION 1..944: note = Variant of the Homo Sapiens Lysosomal alpha-glucosidase
MEWSWVFLFFLSVTTGVHSGHILWHDFSTVPRELSGSSQVLEETHPAHQVGASRPGPRDAQEHPGRPRAVPTQCDVPENSRFDCAPEKAITQEQCEARGCCYIPAKQGLQGAQMGQPWCFFPPSYPSYKLENLSQSEMGYTATLTRTTPSFFPKDILTLRLDVMMETENRLHFTIKDPANRRYEVPLETPHVHSRAPSPLYSVEFSEEPFGVIVRRQLDGRVLLNTTVAPLFFADQFLQLSTSLPSQYITGLAEHLSPLMLSTSWNKITLWNRDLAPTPGANLYGSHPFYLALEDGGSAHGVFLLNSNAMDVVLQPSPALSWRSTGGILDVYIFLGPEPKSVVQQYLDVVGYPFMPPYWGLGFHLCRWGYSSTAITRQVVENMTRAHFPLDVQWNDLDYMDSRRDFTFNKDGFRDFPAMVQELHQGGRRYMMIVDPGISSSGPAGSYRPYDEGLRRGVFITNETGQPLIGKVWPGSTAFPDFTNPEALAWWEDMVAEFHDQVPFDGMWIDMNEPSNFIRGSVDGCPNNELENPPYVPGVVGGTLQAATICASSHQFLSTHYNLHNLYGTTEAIASHRALVKARGTRPFVISRSTFAGHGRYAGHWTGDVWSSWEQLASSVPEILQFNLLGVPLVGADVCGFLGNTSEELCVRWTQLGAFYPFMRNHNSLTSLPQEPYSFSEPAQQAMRKALGLRYALLPHLYTLFHQAHVHGETVARPLFLEFPKDSSTWTVDHQMLWGEALLITPVLQPGKAEVTGYFPLGTWYDLQTVPVEALGSLPPPPAAPREPAIHSEGQWVTLPAPLDTINVHLREGYIIPLQGPGLTTTESRKQPMALAVALTKSGEARGELFWDDGESLEVLERGAYTQVIFEARNNTIVNELVHVTSEGAGLQLGKVTVLGVATAPQQVLSNGRPVSNFTYSPDTKVLDICVALLMGEQFLVSWC

SEQ ID NO: 277 - DNA, 2832 bp, synthetic construct
  misc_feature 1..2832: note = Variant of the Homo Sapiens Lysosomal alpha-glucosidase
  source 1..2832: mol_type = other DNA
atggaatggagctgggtctttctcttcttcctgtcagtaacgactggtgtccactccggacacattctgtggcatgatttttctaccgtgcctagagagctttccggttcaagtcaagtcctcgaagaaacacatccagcccatcaggttggcgcatctaggccgggccctcgggacgctcaactccacccagggagacctagggccgttcccactcagtgcgacgtgccagagaactcacgcttcgattgtgcacctgagaaggctatcacgcaagagcagtgcgaggcccgcggatgttgttacataccggctaaacaggggctgcagggtgcgcagatgggccaaccttggtgcttcttcccaccatcctatccgagttacaagctggagaatctctcccagtctgaaatgggatataccgcaacactgactcggaccaccccctccttctttcccaaagatatcttgactctgagacttgacgtaatgatggagacagaaaacaggctccactttaccattaaggaccctgccaatcgccgatacgaggtgcctctggaaacaccacacgtgcacagtagagctccatcacctctgtattctgtcgagttctccgaagagccgtttggcgttatcgtcaggaggcagctcgacgggcgagtgcttctgaacacgactgtggccccgttgttctttgcggatcagtttctgcaactgtcaacaagtctcccttctcagtacattaccgggcttgcagagcatctgtccccactcatgctgagtacttcatggaacaaaatcacactgtggaatagagaccttgctcctactccaggagccaacttgtatggttctcaccctttctacttggccctggaagatggcggatcagcgcatggcgtattcctcctgaattccaacgcaatggacgttgttcttcagccatctcctgctttgagttggagatctacaggcgggatactggacgtctacatctttctgggtccagagcctaaatccgtagtgcagcagtatcttgatgtcgtcggatacccgtttatgccaccatattggggcctggggttccacttgtgccgctggggatattcatccaccgccattacacgacaagttgttgagaatatgaccagggcacattttcctctggatgtacagtggaacgacctggactacatggatagtcgccgcgacttcaccttcaataaggatgggttcagagactttcctgctatggtccaagaacttcaccagggaggcaggaggtacatgatgatcgtagatccgggaatttcttcttctggcccagccggttcatacagaccgtatgacgaaggactgcgacgaggcgtctttatcacgaacgagactggtcagcctttgataggcaaggtttggccagggtccaccgctttcccggatttcacaaatcctgaggcactggcctggtgggaagatatggtcgccgagtttcacgaccaggtcccatttgacgggatgtggatcgacatgaacgagccatccaacttcattagaggaagtgtggatggctgtccgaataatgagctggaaaaccctccttacgtaccaggcgttgttggtgggactcttcaagctgcgacgatttgcgcatcctcccatcagttcctgtcaacccactataacttgcacaatctgtacgggattacagaggctatcgccagtcatagggccctggtaaaagctagaggaacacgccctttcgttatctctcgctcaacttttgcaggccacggtaggtatgccggacattggaccggcgacgtctggagttcttgggaacagctggcttcctccgttccagagatattgcagtttaacctgttgggagtcccacttgtaggtgcagatgtttgtggcttcctggggaacacctcagaagaattgtgcgtaagatggactcaactgggcgccttctacccttttatgcgcaatcacaactcactgacatctttgcctcaagaaccgtactcatttagtgagccagcacagcaggccatgaggaaggctcttggcctgagatatgcacttctgccgcatctgtacacccttttccaccaggctcatgtccatggagagactgttgcacgacctctgttcttggagttcccaaaagactcttccacgtggacagtcgatcaccagatgctgtggggcgaggctctgctgattacacctgtattgcaacctggtaaggccgaagttaccgggtactttccattggggacctggtatgatctgcaaacagtcccggttgaagctcttggaagtcttccacctccacctgctgcaccaagggagcctgcgatccactctgaaggacagtgggtaactttgcctgcaccgctggacaccatcaatgtccatctgcgcgaaggctacatcataccacttcaaggtcctggactgaccactacagagtctagaaaacaaccaatggctcttgctgttgcactgactaaaagcggcgaagcaaggggtgagctgttctgggacgacggagagtcactggaggtactcgaacgaggcgcgtatacgcaggtcatttttgaggctcgcaataatacgatcgttaacgagctggtccacgtcacttcagaaggtgcaggccttcagttgggcaaggtaactgtcctgggagttgctacagcaccgcagcaggtcttgtccaacggacggcccgtaagcaactttacctatagtcctgataccaaagttctggacatctgcgttgctctgctgatgggtgagcagttcctggtatcatggtgc

SEQ ID NO: 278 - protein, 944 aa, synthetic construct
  REGION 1..944: note = Variant of the Homo Sapiens Lysosomal alpha-glucosidase
MEWSWVFLFFLSVTTGVHSGHILWHDFSTVPRELSGSSQVLEETHPAHQVGASRPGPRDAQLHPGRPRAVPTQCDVPENSRFDCAPEKAITQEQCEARGCCYIPAKQGLQGAQMGQPWCFFPPSYPSYKLENLSQSEMGYTATLTRTTPSFFPKDILTLRLDVMMETENRLHFTIKDPANRRYEVPLETPHVHSRAPSPLYSVEFSEEPFGVIVRRQLDGRVLLNTTVAPLFFADQFLQLSTSLPSQYITGLAEHLSPLMLSTSWNKITLWNRDLAPTPGANLYGSHPFYLALEDGGSAHGVFLLNSNAMDVVLQPSPALSWRSTGGILDVYIFLGPEPKSVVQQYLDVVGYPFMPPYWGLGFHLCRWGYSSTAITRQVVENMTRAHFPLDVQWNDLDYMDSRRDFTFNKDGFRDFPAMVQELHQGGRRYMMIVDPGISSSGPAGSYRPYDEGLRRGVFITNETGQPLIGKVWPGSTAFPDFTNPEALAWWEDMVAEFHDQVPFDGMWIDMNEPSNFIRGSVDGCPNNELENPPYVPGVVGGTLQAATICASSHQFLSTHYNLHNLYGITEAIASHRALVKARGTRPFVISRSTFAGHGRYAGHWTGDVWSSWEQLASSVPEILQFNLLGVPLVGADVCGFLGNTSEELCVRWTQLGAFYPFMRNHNSLTSLPQEPYSFSEPAQQAMRKALGLRYALLPHLYTLFHQAHVHGETVARPLFLEFPKDSSTWTVDHQMLWGEALLITPVLQPGKAEVTGYFPLGTWYDLQTVPVEALGSLPPPPAAPREPAIHSEGQWVTLPAPLDTINVHLREGYIIPLQGPGLTTTESRKQPMALAVALTKSGEARGELFWDDGESLEVLERGAYTQVIFEARNNTIVNELVHVTSEGAGLQLGKVTVLGVATAPQQVLSNGRPVSNFTYSPDTKVLDICVALLMGEQFLVSWC

SEQ ID NO: 279 - DNA, 2832 bp, synthetic construct
  misc_feature 1..2832: note = Variant of the Homo Sapiens Lysosomal alpha-glucosidase
  source 1..2832: mol_type = other DNA
atggaatggagctgggtctttctcttcttcctgtcagtaacgactggtgtccactccggacacattctgtggcatgattttgtgaccgtgcctagagagctttccggttcaagtcaagtcctcgaagaaacacatccagcccatcaggttggcgcatctaggccgggccctcgggacgctcaactccacccagggagacctagggccgttcccactcagtgcgacgtgccagagaactcacgcttcgattgtgcacctgagaaggctatcacgcaagagcagtgcgaggcccgcggatgttgttacataccggctaaacaggggctgcagggtgcgcagatgggccaaccttggtgcttcttcccaccatcctatccgagttacaagctggagaatctctcccagtctgaaatgggatataccgcaacactgactcggaccaccccctccttctttcccaaagatatcttgactctgagacttgacgtaatgatggagacagaaaacaggctccactttaccattaaggaccctgccaatcgccgatacgaggtgcctctggaaacaccacacgtgcacagtagagctccatcacctctgtattctgtcgagttctccgaagagccgtttggcgttatcgtcaggaggcagctcgacgggcgagtgcttctgaacacgactgtggccccgttgttctttgcggatcagtttctgcaactgtcaacaagtctcccttctcagtacattaccgggcttgcagagcatctgtccccactcatgctgagtacttcatggaacaaaatcacactgtggaatagagaccttgctcctactccaggagccaacttgtatggttctcaccctttctacttggccctggaagatggcggatcagcgcatggcgtattcctcctgaattccaacgcaatggacgttgttcttcagccatctcctgctttgagttggagatctacaggcgggatactggacgtctacatctttctgggtccagagcctaaatccgtagtgcagcagtatcttgatgtcgtcggatacccgtttatgccaccatattggggcctggggttccacttgtgccgctggggatattcatccaccgccattacacgacaagttgttgagaatatgaccagggcacattttcctctggatgtacagtggaacgacctggactacatggatagtcgccgcgacttcaccttcaataaggatgggttcagagactttcctgctatggtccaagaacttcaccagggaggcaggaggtacatgatgatcgtagatccgggaatttcttcttctggcccagccggttcatacagaccgtatgacgaaggactgcgacgaggcgtctttatcacgaacgagactggtcagcctttgataggcaaggtttggccagggtccaccgctttcccggatttcacaaatcctgaggcactggcctggtgggaagatatggtcgccgagtttcacgaccaggtcccatttgacgggatgtggatcgacatgaacgagccatccaacttcattagaggaagtgtggatggctgtccgaataatgagctggaaaaccctccttacgtaccaggcgttgttggtgggactcttcaagctgcgacgatttgcgcatcctcccatcagttcctgtcaacccactataacttgcacaatctgtacgggacaacagaggctatcgccagtcatagggccctggtaaaagctagaggaacacgccctttcgttatctctcgctcaacttttgcaggccacggtaggtatgccggacattggaccggcgacgtctggagttcttgggaacagctggcttcctccgttccagagatattgcagtttaacctgttgggagtcccacttgtaggtgcagatgtttgtggcttcctggggaacacctcagaagaattgtgcgtaagatggactcaactgggcgccttctacccttttatgcgcaatcacaactcactgacatctttgcctcaagaaccgtactcatttagtgagccagcacagcaggccatgaggaaggctcttggcctgagatatgcacttctgccgcatctgtacacccttttccaccaggctcatgtccatggagagactgttgcacgacctctgttcttggagttcccaaaagactcttccacgtggacagtcgatcaccagatgctgtggggcgaggctctgctgattacacctgtattgcaacctggtaaggccgaagttaccgggtactttccattggggacctggtatgatctgcaaacagtcccggttgaagctcttggaagtcttccacctccacctgctgcaccaagggagcctgcgatccactctgaaggacagtgggtaactttgcctgcaccgctggacaccatcaatgtccatctgcgcgaaggctacatcataccacttcaaggtcctggactgaccactacagagtctagaaaacaaccaatggctcttgctgttgcactgactaaaagcggcgaagcaaggggtgagctgttctgggacgacggagagtcactggaggtactcgaacgaggcgcgtatacgcaggtcatttttgaggctcgcaataatacgatcgttaacgagctggtccacgtcacttcagaaggtgcaggccttcagttgggcaaggtaactgtcctgggagttgctacagcaccgcagcaggtcttgtccaacggacggcccgtaagcaactttacctatagtcctgataccaaagttctggacatctgcgttgctctgctgatgggtgagcagttcctggtatcatggtgc

SEQ ID NO: 280 - protein, 944 aa, synthetic construct
  REGION 1..944: note = Variant of the Homo Sapiens Lysosomal alpha-glucosidase
MEWSWVFLFFLSVTTGVHSGHILWHDFVTVPRELSGSSQVLEETHPAHQVGASRPGPRDAQLHPGRPRAVPTQCDVPENSRFDCAPEKAITQEQCEARGCCYIPAKQGLQGAQMGQPWCFFPPSYPSYKLENLSQSEMGYTATLTRTTPSFFPKDILTLRLDVMMETENRLHFTIKDPANRRYEVPLETPHVHSRAPSPLYSVEFSEEPFGVIVRRQLDGRVLLNTTVAPLFFADQFLQLSTSLPSQYITGLAEHLSPLMLSTSWNKITLWNRDLAPTPGANLYGSHPFYLALEDGGSAHGVFLLNSNAMDVVLQPSPALSWRSTGGILDVYIFLGPEPKSVVQQYLDVVGYPFMPPYWGLGFHLCRWGYSSTAITRQVVENMTRAHFPLDVQWNDLDYMDSRRDFTFNKDGFRDFPAMVQELHQGGRRYMMIVDPGISSSGPAGSYRPYDEGLRRGVFITNETGQPLIGKVWPGSTAFPDFTNPEALAWWEDMVAEFHDQVPFDGMWIDMNEPSNFIRGSVDGCPNNELENPPYVPGVVGGTLQAATICASSHQFLSTHYNLHNLYGTTEAIASHRALVKARGTRPFVISRSTFAGHGRYAGHWTGDVWSSWEQLASSVPEILQFNLLGVPLVGADVCGFLGNTSEELCVRWTQLGAFYPFMRNHNSLTSLPQEPYSFSEPAQQAMRKALGLRYALLPHLYTLFHQAHVHGETVARPLFLEFPKDSSTWTVDHQMLWGEALLITPVLQPGKAEVTGYFPLGTWYDLQTVPVEALGSLPPPPAAPREPAIHSEGQWVTLPAPLDTINVHLREGYIIPLQGPGLTTTESRKQPMALAVALTKSGEARGELFWDDGESLEVLERGAYTQVIFEARNNTIVNELVHVTSEGAGLQLGKVTVLGVATAPQQVLSNGRPVSNFTYSPDTKVLDICVALLMGEQFLVSWC

SEQ ID NO: 281 - DNA, 2832 bp, synthetic construct
  misc_feature 1..2832: note = Variant of the Homo Sapiens Lysosomal alpha-glucosidase
  source 1..2832: mol_type = other DNA
atggaatggagctgggtctttctcttcttcctgtcagtaacgactggtgtccactccggacacattctgtggcatgatttttctaccgtgcctagagagctttccggttcaagtcaagtcctcgaagaaacacatccagcccatcaggttggcgcatctaggccgggccctcgggacgctcaactccacccagggagacctagggccgttcccactcagtgcgacgtgccagagaactcacgcttcgattgtgcacctgagaaggctatcacgcaagagcagtgcgaggcccgcggatgttgttacataccggctaaacaggggctgcagggtgcgcagatgggccaaccttggtgcttcttcccaccatcctatccgagttacaagctggagaatctctcccagtctgaaatgggatataccgcaacactgactcggaccaccccctccttctttcccaaagatatcttgactctgagacttgacgtaatgatggagacagaaaacaggctccactttaccattaaggaccctgccaatcgccgatacgaggtgcctctggaaacaccacacgtgcacagtagagctccatcacctctgtattctgtcgagttctccgaagagccgtttggcgttatcgtcaggaggcagctcgacgggcgagtgcttctgaacacgactgtggccccgttgttctttgcggatcagtttctgcaactgtcaacaagtctcccttctcagtacattaccgggcttgcagagcatctgtccccactcatgctgagtacttcatggaacaaaatcacactgtggaatagagaccttgctcctactccaggagccaacttgtatggttctcaccctttctacttggccctggaagatggcggatcagcgcatggcgtattcctcctgaattccaacgcaatggacgttgttcttcagccatctcctgctttgagttggagatctacaggcgggatactggacgtctacatctttctgggtccagagcctaaatccgtagtgcagcagtatcttgatgtcgtcggatacccgtttatgccaccatattggggcctggggttccacttgtgccgctggggatattcatccaccgccattacacgacaagttgttgagaatatgaccagggcacattttcctctggatgtacagtggaacgacctggactacatggatagtcgccgcgacttcaccttcaataaggatgggttcagagactttcctgctatggtccaagaacttcaccagggaggcaggaggtacatgatgatcgtagatccgggaatttcttcttctggcccagccggttcatacagaccgtatgacgaaggactgcgacgaggcgtctttatcacgaacgagactggtcagcctttgataggcaaggtttggccagggtccaccgctttcccggatttcacaaatcctgtggcactggcctggtgggaagatatggtcgccgagtttcacgaccaggtcccatttgacgggatgtggatcgacatgaacgagccatccaacttcattagaggaagtgtggatggctgtccgaataatgagctggaaaaccctccttacgtaccaggcgttgttggtgggactcttcaagctgcgacgatttgcgcatcctcccatcagttcctgtcaacccactataacttgcacaatctgtacgggacaacagaggctatcgccagtcatagggccctggtaaaagctagaggaacacgccctttcgttatctctcgctcaacttttgcaggccacggtaggtatgccggacattggaccggcgacgtctggagttcttgggaacagctggcttcctccgttccagagatattgcagtttaacctgttgggagtcccacttgtaggtgcagatgtttgtggcttcctggggaacacctcagaagaattgtgcgtaagatggactcaactgggcgccttctacccttttatgcgcaatcacaactcactgacatctttgcctcaagaaccgtactcatttagtgagccagcacagcaggccatgaggaaggctcttggcctgagatatgcacttctgccgcatctgtacacccttttccaccaggctcatgtccatggagagactgttgcacgacctctgttcttggagttcccaaaagactcttccacgtggacagtcgatcaccagatgctgtggggcgaggctctgctgattacacctgtattgcaacctggtaaggccgaagttaccgggtactttccattggggacctggtatgatctgcaaacagtcccggttgaagctcttggaagtcttccacctccacctgctgcaccaagggagcctgcgatccactctgaaggacagtgggtaactttgcctgcaccgctggacaccatcaatgtccatctgcgcgaaggctacatcataccacttcaaggtcctggactgaccactacagagtctagaaaacaaccaatggctcttgctgttgcactgactaaaagcggcgaagcaaggggtgagctgttctgggacgacggagagtcactggaggtactcgaacgaggcgcgtatacgcaggtcatttttgaggctcgcaataatacgatcgttaacgagctggtccacgtcacttcagaaggtgcaggccttcagttgggcaaggtaactgtcctgggagttgctacagcaccgcagcaggtcttgtccaacggacggcccgtaagcaactttacctatagtcctgataccaaagttctggacatctgcgttgctctgctgatgggtgagcagttcctggtatcatggtgc

SEQ ID NO: 282 - protein, 944 aa, synthetic construct
  REGION 1..944: note = Variant of the Homo Sapiens Lysosomal alpha-glucosidase
MEWSWVFLFFLSVTTGVHSGHILWHDFSTVPRELSGSSQVLEETHPAHQVGASRPGPRDAQLHPGRPRAVPTQCDVPENSRFDCAPEKAITQEQCEARGCCYIPAKQGLQGAQMGQPWCFFPPSYPSYKLENLSQSEMGYTATLTRTTPSFFPKDILTLRLDVMMETENRLHFTIKDPANRRYEVPLETPHVHSRAPSPLYSVEFSEEPFGVIVRRQLDGRVLLNTTVAPLFFADQFLQLSTSLPSQYITGLAEHLSPLMLSTSWNKITLWNRDLAPTPGANLYGSHPFYLALEDGGSAHGVFLLNSNAMDVVLQPSPALSWRSTGGILDVYIFLGPEPKSVVQQYLDVVGYPFMPPYWGLGFHLCRWGYSSTAITRQVVENMTRAHFPLDVQWNDLDYMDSRRDFTFNKDGFRDFPAMVQELHQGGRRYMMIVDPGISSSGPAGSYRPYDEGLRRGVFITNETGQPLIGKVWPGSTAFPDFTNPVALAWWEDMVAEFHDQVPFDGMWIDMNEPSNFIRGSVDGCPNNELENPPYVPGVVGGTLQAATICASSHQFLSTHYNLHNLYGTTEAIASHRALVKARGTRPFVISRSTFAGHGRYAGHWTGDVWSSWEQLASSVPEILQFNLLGVPLVGADVCGFLGNTSEELCVRWTQLGAFYPFMRNHNSLTSLPQEPYSFSEPAQQAMRKALGLRYALLPHLYTLFHQAHVHGETVARPLFLEFPKDSSTWTVDHQMLWGEALLITPVLQPGKAEVTGYFPLGTWYDLQTVPVEALGSLPPPPAAPREPAIHSEGQWVTLPAPLDTINVHLREGYIIPLQGPGLTTTESRKQPMALAVALTKSGEARGELFWDDGESLEVLERGAYTQVIFEARNNTIVNELVHVTSEGAGLQLGKVTVLGVATAPQQVLSNGRPVSNFTYSPDTKVLDICVALLMGEQFLVSWC

SEQ ID NO: 283 - DNA, 2832 bp, synthetic construct
  misc_feature 1..2832: note = Variant of the Homo Sapiens Lysosomal alpha-glucosidase
  source 1..2832: mol_type = other DNA
atggaatggagctgggtctttctcttcttcctgtcagtaacgactggtgtccactccggacacattctgtggcatgatttttctaccgtgcctagagagctttccggttcaagtcaagtcctcgaagaaacacatccagcccatcaggttggcgcatctaggccgggccctcgggacgctcaactccacccagggagacctagggccgttcccactcagtgcgacgtgccagagaactcacgcttcgattgtgcacctgagaaggctatcacgcaagagcagtgcgaggcccgcggatgttgttacataccggctaaacaggggctgcagggtgcgcagatgggccaaccttggtgcttcttcccaccatcctatccgagttacaagctggagaatctctcccagtctgaaatgggatataccgcaacactgactcggaccaccccctccttctttcccaaagatatcttgactctgagacttgacgtaatgatggagacagaaaacaggctccactttaccattaaggaccctgccaatcgccgatacgaggtgcctctggaaacaccacacgtgcacagtagagctccatcacctctgtattctgtcgagttctccgaagagccgtttggcgttatcgtcaggaggcagctcgacgggcgagtgcttctgaacacgactgtggccccgttgttctttgcggatcagtttctgcaactgtcaacaagtctcccttctcagtacattaccgggcttgcagagcatctgtccccactcatgctgagtacttcatggaacaaaatcacactgtggaatagagaccttgctcctactccaggagccaacttgtatggttctcaccctttctacttggccctggaagatggcggatcagcgcatggcgtattcctcctgaattccaacgcaatggacgttgttcttcagccatctcctgctttgagttggagatctacaggcgggatactggacgtctacatctttctgggtccagagcctaaatccgtagtgcagcagtatcttgatgtcgtcggatacccgtttatgccaccatattggggcctggggttccacttgtgccgctggggatattcatccaccgccattacacgacaagttgttgagaatatgaccagggcacattttcctctggatgtacagtggaacgacctggactacatggatagtcgccgcgacttcaccttcaataaggatgggttcagagactttcctgctatggtccaagaacttcaccagggaggcaggaggtacatgatgatcgtagatccgggaatttcttcttctggcccagccggttcatacagaccgtatgacgaaggactgcgacgaggcgtctttatcacgaacgagactggtcagcctttgataggcaaggtttggccagggtccaccgctttcccggatttcacaaatcctgaggcactggcctggtgggaagatatggtcgccgagtttcacgaccaggtcccatttgacgggatgtggatcgacatgaacgagccatccaacttcattagaggaagtgtggatggctgtccgaataatgagctggaaaaccctccttacgtaccaggcgttgttggtgggactcttcaagctgcgacgatttgcgcatcctcccatcagttcctgtcaacccactataacttgcacaatctgtacgggacaacagaggctatcgccagtcatagggccctggtaaaagctagaggaacacgccctttcgttatctctcgctcaacttttgcaggccacggtaggtatgccggacattggaccggcgacgtctggagttcttgggaacagctggcttcctccgttccagagatattgcagtttaacctgttgggagtcccacttgtaggtgcagatgtttgtggcttcctggggaacacctcagaagaattgtgcgtaagatggactcaactgggcgccttctacccttttatgcgcaatcacaactcactgacatctttgcctcaagaaccgtactcatttagtgagccagcacagcaggccatgaggaaggctcttggcctgagatatgcacttctgccgcatctgtacacccttttccaccaggctcatgtccatggagagactgttgcacgacctctgttcttggagttcccaaaagactcttccacgtggacagtcgatcaccagatgctgtggggcgaggctctgctgattacacctgtattgcaacctggtaaggccgaagttaccgggtactttccattggggacctggtatgatctgcaaacagtcccggttgaagctcttggaagtcttccacctccacctgctgcaccaagggagcctgcgatccactctgaaggacagtgggtaactttgcctgcaccgctggacaccatcaatgtccatctgcgcgaaggctacatcataccacttcaaggtcctggactgaccactacagagtctagaaaacaaccaatggctcttgctgttgcactgactaaaagcggcgaagcaaggggtgagctgttctgggacgacggagagtcactggaggtactcgaacgaggcgcgtatacgcaggtcatttttgtggctcgcaataatacgatcgttaacgagctggtccacgtcacttcagaaggtgcaggccttcagttgggcaaggtaactgtcctgggagttgctacagcaccgcagcaggtcttgtccaacggacggcccgtaagcaactttacctatagtcctgataccaaagttctggacatctgcgttgctctgctgatgggtgagcagttcctggtatcatggtgc

SEQ ID NO: 284 - protein, 944 aa, synthetic construct
  REGION 1..944: note = Variant of the Homo Sapiens Lysosomal alpha-glucosidase
MEWSWVFLFFLSVTTGVHSGHILWHDFSTVPRELSGSSQVLEETHPAHQVGASRPGPRDAQLHPGRPRAVPTQCDVPENSRFDCAPEKAITQEQCEARGCCYIPAKQGLQGAQMGQPWCFFPPSYPSYKLENLSQSEMGYTATLTRTTPSFFPKDILTLRLDVMMETENRLHFTIKDPANRRYEVPLETPHVHSRAPSPLYSVEFSEEPFGVIVRRQLDGRVLLNTTVAPLFFADQFLQLSTSLPSQYITGLAEHLSPLMLSTSWNKITLWNRDLAPTPGANLYGSHPFYLALEDGGSAHGVFLLNSNAMDVVLQPSPALSWRSTGGILDVYIFLGPEPKSVVQQYLDVVGYPFMPPYWGLGFHLCRWGYSSTAITRQVVENMTRAHFPLDVQWNDLDYMDSRRDFTFNKDGFRDFPAMVQELHQGGRRYMMIVDPGISSSGPAGSYRPYDEGLRRGVFITNETGQPLIGKVWPGSTAFPDFTNPEALAWWEDMVAEFHDQVPFDGMWIDMNEPSNFIRGSVDGCPNNELENPPYVPGVVGGTLQAATICASSHQFLSTHYNLHNLYGTTEAIASHRALVKARGTRPFVISRSTFAGHGRYAGHWTGDVWSSWEQLASSVPEILQFNLLGVPLVGADVCGFLGNTSEELCVRWTQLGAFYPFMRNHNSLTSLPQEPYSFSEPAQQAMRKALGLRYALLPHLYTLFHQAHVHGETVARPLFLEFPKDSSTWTVDHQMLWGEALLITPVLQPGKAEVTGYFPLGTWYDLQTVPVEALGSLPPPPAAPREPAIHSEGQWVTLPAPLDTINVHLREGYIIPLQGPGLTTTESRKQPMALAVALTKSGEARGELFWDDGESLEVLERGAYTQVIFVARNNTIVNELVHVTSEGAGLQLGKVTVLGVATAPQQVLSNGRPVSNFTYSPDTKVLDICVALLMGEQFLVSWC

SEQ ID NO: 285 - DNA, 2832 bp, synthetic construct
  misc_feature 1..2832: note = Variant of the Homo Sapiens Lysosomal alpha-glucosidase
  source 1..2832: mol_type = other DNA
atggaatggagctgggtctttctcttcttcctgtcagtaacgactggtgtccactccggacacattctgtggcatgatttttcttcggtgcctagagagctttccggttcaagtcaagtcctcgaagaaacacatccagcccatcaggttggcgcatctaggccgggccctcgggacgctcaactccacccagggagacctagggccgttcccactcagtgcgacgtgccagagaactcacgcttcgattgtgcacctgagaaggctatcacgcaagagcagtgcgaggcccgcggatgttgttacataccggctaaacaggggctgcagggtgcgcagatgggccaaccttggtgcttcttcccaccatcctatccgagttacaagctggagaatctctcccagtctgaaatgggatataccgcaacactgactcggaccaccccctccttctttcccaaagatatcttgactctgagacttgacgtaatgatggagacagaaaacaggctccactttaccattaaggaccctgccaatcgccgatacgaggtgcctctggaaacaccacacgtgcacagtagagctccatcacctctgtattctgtcgagttctccgaagagccgtttggcgttatcgtcaggaggcagctcgacgggcgagtgcttctgaacacgactgtggccccgttgttctttgcggatcagtttctgcaactgtcaacaagtctcccttctcagtacattaccgggcttgcagagcatctgtccccactcatgctgagtacttcatggaacaaaatcacactgtggaatagagaccttgctcctactccaggagccaacttgtatggttctcaccctttctacttggccctggaagatggcggatcagcgcatggcgtattcctcctgaattccaacgcaatggacgttgttcttcagccatctcctgctttgagttggagatctacaggcgggatactggacgtctacatctttctgggtccagagcctaaatccgtagtgcagcagtatcttgatgtcgtcggatacccgtttatgccaccatattggggcctggggttccacttgtgccgctggggatattcatccaccgccattacacgacaagttgttgagaatatgaccagggcacattttcctctggatgtacagtggaacgacctggactacatggatagtcgccgcgacttcaccttcaataaggatgggttcagagactttcctgctatggtccaagaacttcaccagggaggcaggaggtacatgatgatcgtagatccgggaatttcttcttctggcccagccggttcatacagaccgtatgacgaaggactgcgacgaggcgtctttatcacgaacgagactggtcagcctttgataggcaaggtttggccagggtccaccgctttcccggatttcacaaatcctgaggcactggcctggtgggaagatatggtcgccgagtttcacgaccaggtcccatttgacgggatgtggatcgacatgaacgagccatccaacttcattagaggaagtgtggatggctgtccgaataatgagctggaaaaccctccttacgtaccaggcgttgttggtgggactcttcaagctgcgacgatttgcgcatcctcccatcagttcctgtcaacccactataacttgcacaatctgtacgggacaacagaggctatcgccagtcatagggccctggtaaaagctagaggaacacgccctttcgttatctctcgctcaacttttgcaggccacggtaggtatgccggacattggaccggcgacgtctggagttcttgggaacagctggcttcctccgttccagagatattgcagtttaacctgttgggagtcccacttgtaggtgcagatgtttgtggcttcctggggaacacctcagaagaattgtgcgtaagatggactcaactgggcgccttctacccttttatgcgcaatcacaactcactgacatctttgcctcaagaaccgtactcatttagtgagccagcacagcaggccatgaggaaggctcttggcctgagatatgcacttctgccgcatctgtacacccttttccaccaggctcatgtccatggagagactgttgcacgacctctgttcttggagttcccaaaagactcttccacgtggacagtcgatcaccagatgctgtggggcgaggctctgctgattacacctgtattgcaacctggtaaggccgaagttaccgggtactttccattggggacctggtatgatctgcaaacagtcccggttgaagctcttggaagtcttccacctccacctgctgcaccaagggagcctgcgatccactctgaaggacagtgggtaactttgcctgcaccgctggacaccatcaatgtccatctgcgcgaaggctacatcataccacttcaaggtcctggactgaccactacagagtctagaaaacaaccaatggctcttgctgttgcactgactaaaagcggcgaagcaaggggtgagctgttctgggacgacggagagtcactggaggtactcgaacgaggcgcgtatacgcaggtcatttttgaggctcgcaataatacgatcgttaacgagctggtccacgtcacttcagaaggtgcaggccttcagttgggcaaggtaactgtcctgggagttgctacagcaccgcagcaggtcttgtccaacggacggcccgtaagcaactttacctatagtcctgataccaaagttctggacatctgcgttgctctgctgatgggtgagcagttcctggtatcatggtgc

SEQ ID NO: 286 - protein, 944 aa, synthetic construct
  REGION 1..944: note = Variant of the Homo Sapiens Lysosomal alpha-glucosidase
MEWSWVFLFFLSVTTGVHSGHILWHDFSSVPRELSGSSQVLEETHPAHQVGASRPGPRDAQLHPGRPRAVPTQCDVPENSRFDCAPEKAITQEQCEARGCCYIPAKQGLQGAQMGQPWCFFPPSYPSYKLENLSQSEMGYTATLTRTTPSFFPKDILTLRLDVMMETENRLHFTIKDPANRRYEVPLETPHVHSRAPSPLYSVEFSEEPFGVIVRRQLDGRVLLNTTVAPLFFADQFLQLSTSLPSQYITGLAEHLSPLMLSTSWNKITLWNRDLAPTPGANLYGSHPFYLALEDGGSAHGVFLLNSNAMDVVLQPSPALSWRSTGGILDVYIFLGPEPKSVVQQYLDVVGYPFMPPYWGLGFHLCRWGYSSTAITRQVVENMTRAHFPLDVQWNDLDYMDSRRDFTFNKDGFRDFPAMVQELHQGGRRYMMIVDPGISSSGPAGSYRPYDEGLRRGVFITNETGQPLIGKVWPGSTAFPDFTNPEALAWWEDMVAEFHDQVPFDGMWIDMNEPSNFIRGSVDGCPNNELENPPYVPGVVGGTLQAATICASSHQFLSTHYNLHNLYGTTEAIASHRALVKARGTRPFVISRSTFAGHGRYAGHWTGDVWSSWEQLASSVPEILQFNLLGVPLVGADVCGFLGNTSEELCVRWTQLGAFYPFMRNHNSLTSLPQEPYSFSEPAQQAMRKALGLRYALLPHLYTLFHQAHVHGETVARPLFLEFPKDSSTWTVDHQMLWGEALLITPVLQPGKAEVTGYFPLGTWYDLQTVPVEALGSLPPPPAAPREPAIHSEGQWVTLPAPLDTINVHLREGYIIPLQGPGLTTTESRKQPMALAVALTKSGEARGELFWDDGESLEVLERGAYTQVIFEARNNTIVNELVHVTSEGAGLQLGKVTVLGVATAPQQVLSNGRPVSNFTYSPDTKVLDICVALLMGEQFLVSWC

SEQ ID NO: 287 - DNA, 2832 bp, synthetic construct
  misc_feature 1..2832: note = Variant of the Homo Sapiens Lysosomal alpha-glucosidase
  source 1..2832: mol_type = other DNA
atggaatggagctgggtctttctcttcttcctgtcagtaacgactggtgtccactccggacacattctgtggcatgatttttgtaccgtgcctagagagctttccggttcaagtcaagtcctcgaagaaacacatccagcccatcaggttggcgcatctaggccgggccctcgggacgctcaactccacccagggagacctagggccgttcccactcagtgcgacgtgccagagaactcacgcttcgattgtgcacctgagaaggctatcacgcaagagcagtgcgaggcccgcggatgttgttacataccggctaaacaggggctgcagggtgcgcagatgggccaaccttggtgcttcttcccaccatcctatccgagttacaagctggagaatctctcccagtctgaaatgggatataccgcaacactgactcggaccaccccctccttctttcccaaagatatcttgactctgagacttgacgtaatgatggagacagaaaacaggctccactttaccattaaggaccctgccaatcgccgatacgaggtgcctctggaaacaccacacgtgcacagtagagctccatcacctctgtattctgtcgagttctccgaagagccgtttggcgttatcgtcaggaggcagctcgacgggcgagtgcttctgaacacgactgtggccccgttgttctttgcggatcagtttctgcaactgtcaacaagtctcccttctcagtacattaccgggcttgcagagcatctgtccccactcatgctgagtacttcatggaacaaaatcacactgtggaatagagaccttgctcctactccaggagccaacttgtatggttctcaccctttctacttggccctggaagatggcggatcagcgcatggcgtattcctcctgaattccaacgcaatggacgttgttcttcagccatctcctgctttgagttggagatctacaggcgggatactggacgtctacatctttctgggtccagagcctaaatccgtagtgcagcagtatcttgatgtcgtcggatacccgtttatgccaccatattggggcctggggttccacttgtgccgctggggatattcatccaccgccattacacgacaagttgttgagaatatgaccagggcacattttcctctggatgtacagtggaacgacctggactacatggatagtcgccgcgacttcaccttcaataaggatgggttcagagactttcctgctatggtccaagaacttcaccagggaggcaggaggtacatgatgatcgtagatccgggaatttcttcttctggcccagccggttcatacagaccgtatgacgaaggactgcgacgaggcgtctttatcacgaacgagactggtcagcctttgataggcaaggtttggccagggtccaccgctttcccggatttcacaaatcctgaggcactggcctggtgggaagatatggtcgccgagtttcacgaccaggtcccatttgacgggatgtggatcgacatgaacgagccatccaacttcattagaggaagtgtggatggctgtccgaataatgagctggaaaaccctccttacgtaccaggcgttgttggtgggactcttcaagctgcgacgatttgcgcatcctcccatcagttcctgtcaacccactataacttgcacaatctgtacgggacaacagaggctatcgccagtcatagggccctggtaaaagctagaggaacacgccctttcgttatctctcgctcaacttttgcaggccacggtaggtatgccggacattggaccggcgacgtctggagttcttgggaacagctggcttcctccgttccagagatattgcagtttaacctgttgggagtcccacttgtaggtgcagatgtttgtggcttcctggggaacacctcagaagaattgtgcgtaagatggactcaactgggcgccttctacccttttatgcgcaatcacaactcactgacatctttgcctcaagaaccgtactcatttagtgagccagcacagcaggccatgaggaaggctcttggcctgagatatgcacttctgccgcatctgtacacccttttccaccaggctcatgtccatggagagactgttgcacgacctctgttcttggagttcccaaaagactcttccacgtggacagtcgatcaccagatgctgtggggcgaggctctgctgattacacctgtattgcaacctggtaaggccgaagttaccgggtactttccattggggacctggtatgatctgcaaacagtcccggttgaagctcttggaagtcttccacctccacctgctgcaccaagggagcctgcgatccactctgaaggacagtgggtaactttgcctgcaccgctggacaccatcaatgtccatctgcgcgaaggctacatcataccacttcaaggtcctggactgaccactacagagtctagaaaacaaccaatggctcttgctgttgcactgactaaaagcggcgaagcaaggggtgagctgttctgggacgacggagagtcactggaggtactcgaacgaggcgcgtatacgcaggtcatttttgaggctcgcaataatacgatcgttaacgagctggtccacgtcacttcagaaggtgcaggccttcagttgggcaaggtaactgtcctgggagttgctacagcaccgcagcaggtcttgtccaacggacggcccgtaagcaactttacctatagtcctgataccaaagttctggacatctgcgttgctctgctgatgggtgagcagttcctggtatcatggtgc

SEQ ID NO: 288 - protein, 944 aa, synthetic construct
  REGION 1..944: note = Variant of the Homo Sapiens Lysosomal alpha-glucosidase
MEWSWVFLFFLSVTTGVHSGHILWHDFCTVPRELSGSSQVLEETHPAHQVGASRPGPRDAQLHPGRPRAVPTQCDVPENSRFDCAPEKAITQEQCEARGCCYIPAKQGLQGAQMGQPWCFFPPSYPSYKLENLSQSEMGYTATLTRTTPSFFPKDILTLRLDVMMETENRLHFTIKDPANRRYEVPLETPHVHSRAPSPLYSVEFSEEPFGVIVRRQLDGRVLLNTTVAPLFFADQFLQLSTSLPSQYITGLAEHLSPLMLSTSWNKITLWNRDLAPTPGANLYGSHPFYLALEDGGSAHGVFLLNSNAMDVVLQPSPALSWRSTGGILDVYIFLGPEPKSVVQQYLDVVGYPFMPPYWGLGFHLCRWGYSSTAITRQVVENMTRAHFPLDVQWNDLDYMDSRRDFTFNKDGFRDFPAMVQELHQGGRRYMMIVDPGISSSGPAGSYRPYDEGLRRGVFITNETGQPLIGKVWPGSTAFPDFTNPEALAWWEDMVAEFHDQVPFDGMWIDMNEPSNFIRGSVDGCPNNELENPPYVPGVVGGTLQAATICASSHQFLSTHYNLHNLYGTTEAIASHRALVKARGTRPFVISRSTFAGHGRYAGHWTGDVWSSWEQLASSVPEILQFNLLGVPLVGADVCGFLGNTSEELCVRWTQLGAFYPFMRNHNSLTSLPQEPYSFSEPAQQAMRKALGLRYALLPHLYTLFHQAHVHGETVARPLFLEFPKDSSTWTVDHQMLWGEALLITPVLQPGKAEVTGYFPLGTWYDLQTVPVEALGSLPPPPAAPREPAIHSEGQWVTLPAPLDTINVHLREGYIIPLQGPGLTTTESRKQPMALAVALTKSGEARGELFWDDGESLEVLERGAYTQVIFEARNNTIVNELVHVTSEGAGLQLGKVTVLGVATAPQQVLSNGRPVSNFTYSPDTKVLDICVALLMGEQFLVSWC

SEQ ID NO: 289 - DNA, 2832 bp, synthetic construct
  misc_feature 1..2832: note = Variant of the Homo Sapiens Lysosomal alpha-glucosidase
  source 1..2832: mol_type = other DNA
atggaatggagctgggtctttctcttcttcctgtcagtaacgactggtgtccactccggacacattctgtggcatgatttttctaccgtgcctagagagctttccggttcaagtcaagtcctcgaagaaacacatccagcccatcaggttggcgcatctaggccgggccctcgggacgctcaactccacccagggagacctagggccgttcccactcagtgcgacgtgccagagaactcacgcttcgattgtgcacctgagaaggctatcacgcaagagcagtgcgaggcccgcggatgttgttacataccggctaaacaggggctgcagggtgcgcagatgggccaaccttggtgcttcttcccaccatcctatccgagttacaagctggagaatctctcccagtctgaaatgggatataccgcaacactgactcggaccaccccctccttctttcccaaagatatcttgactctgagacttgacgtaatgatggagacagaaaacaggctccactttaccattaaggaccctgccaatcgccgatacgaggtgcctctggaaacaccacacgtgcacagtagagctccatcacctctgtattctgtcgagttctccgaagagccgtttggcgttatcgtcaggaggcagctcgacgggcgagtgcttctgaacacgactgtggccccgttgttctttgcggatcagtttctgcaactgtcaacaagtctcccttctcagtacattaccgggcttgcagagcatctgtccccactcatgctgagtacttcatggaacaaaatcacactgtggaatagagaccttgctcctactccaggagccaacttgtatggttctcaccctttctacttggccctggaagatggcggatcagcgcatggcgtattcctcctgaattccaacgcaatggacgttgttcttcagccatctcctgctttgagttggagatctacaggcgggatactggacgtctacatctttctgggtccagagcctaaatccgtagtgcagcagtatcttgatgtcgtcggatacccgtttatgccaccatattggggcctggggttccacttgtgccgctggggatattcatccaccgccattacacgacaagttgttgagaatatgaccagggcacattttcctctggatgtacagtggaacgacctggactacatggatagtcgccgcgacttcaccttcaataaggatgggttcagagactttcctgctatggtccaagaacttcaccagggaggcaggaggtacatgatgatcgtagatccgggaatttcttcttctggcccagccggttcatacagaccgtatgacgaaggactgcgacgaggcgtctttatcacgaacgagactggtcagcctttgataggcaaggtttggccagggtccaccgctttcccggatttcacaaatcctgaggcactggcctggtgggaagatatggtcgccgagtttcacgaccaggtcccatttgacgggatgtggatcgacatgaacgagccatccaacttcattagaggaagtgtggatggctgtccgaataatgagctggaaaaccctccttacgtaccaggcgttgttggtgggactcttcaagctgcgacgatttgcgcatcctcccatcagttcctgtcaacccactataacttgcacaatctgtacgggacaacagaggctatcgccagtcatagggccctggtaaaagctagaggaacacgccctttcgttatctctcgctcaacttttgcaggccacggtaggtatgccggacattggaccggcgacgtctggagttcttgggaacagctggcttcctccgttccagagatattgcagtttaacctgttgggagtcccacttgtaggtgcagatgtttgtggcttcctggggaacacctcagaagaattgtgcgtaagatggactcaactgggcgccttctacccttttatgcgcaatcacaactcactgacatctttgcctcaagaaccgtactcatttagtgagccagcacagcaggccatgaggaaggctcttggcctgagatatgcacttctgccgcatctgtacacccttttccaccaggctcatgtccatggagagactgttgcacgacctctgttcttggagttcccaaaagactcttccacgtggacagtcgatcaccagatgctgtggggcgaggctctgctgattacacctgtattgcaacctggtaaggccgaagttaccgggtactttccattggggacctggtatgatctgcaaacagtcccggttgaagctcttggaagtcttccacctccacctgctgcaccaagggagcctgcgatccactctgaaggacagtgggtaactttgcctgcaccgctggacaccatcaatgtccatctgcgcgaaggctacatcataccacttcaaggtcctggactgaccactacagagtctagactgcaaccaatggctcttgctgttgcactgactaaaagcggcgaagcaaggggtgagctgttctgggacgacggagagtcactggaggtactcgaacgaggcgcgtatacgcaggtcatttttgaggctcgcaataatacgatcgttaacgagctggtccacgtcacttcagaaggtgcaggccttcagttgggcaaggtaactgtcctgggagttgctacagcaccgcagcaggtcttgtccaacggacggcccgtaagcaactttacctatagtcctgataccaaagttctggacatctgcgttgctctgctgatgggtgagcagttcctggtatcatggtgc

SEQ ID NO: 290 - protein, 944 aa, synthetic construct
  REGION 1..944: note = Variant of the Homo Sapiens Lysosomal alpha-glucosidase
MEWSWVFLFFLSVTTGVHSGHILWHDFSTVPRELSGSSQVLEETHPAHQVGASRPGPRDAQLHPGRPRAVPTQCDVPENSRFDCAPEKAITQEQCEARGCCYIPAKQGLQGAQMGQPWCFFPPSYPSYKLENLSQSEMGYTATLTRTTPSFFPKDILTLRLDVMMETENRLHFTIKDPANRRYEVPLETPHVHSRAPSPLYSVEFSEEPFGVIVRRQLDGRVLLNTTVAPLFFADQFLQLSTSLPSQYITGLAEHLSPLMLSTSWNKITLWNRDLAPTPGANLYGSHPFYLALEDGGSAHGVFLLNSNAMDVVLQPSPALSWRSTGGILDVYIFLGPEPKSVVQQYLDVVGYPFMPPYWGLGFHLCRWGYSSTAITRQVVENMTRAHFPLDVQWNDLDYMDSRRDFTFNKDGFRDFPAMVQELHQGGRRYMMIVDPGISSSGPAGSYRPYDEGLRRGVFITNETGQPLIGKVWPGSTAFPDFTNPEALAWWEDMVAEFHDQVPFDGMWIDMNEPSNFIRGSVDGCPNNELENPPYVPGVVGGTLQAATICASSHQFLSTHYNLHNLYGTTEAIASHRALVKARGTRPFVISRSTFAGHGRYAGHWTGDVWSSWEQLASSVPEILQFNLLGVPLVGADVCGFLGNTSEELCVRWTQLGAFYPFMRNHNSLTSLPQEPYSFSEPAQQAMRKALGLRYALLPHLYTLFHQAHVHGETVARPLFLEFPKDSSTWTVDHQMLWGEALLITPVLQPGKAEVTGYFPLGTWYDLQTVPVEALGSLPPPPAAPREPAIHSEGQWVTLPAPLDTINVHLREGYIIPLQGPGLTTTESRLQPMALAVALTKSGEARGELFWDDGESLEVLERGAYTQVIFEARNNTIVNELVHVTSEGAGLQLGKVTVLGVATAPQQVLSNGRPVSNFTYSPDTKVLDICVALLMGEQFLVSWC

SEQ ID NO: 291 - DNA, 2832 bp, synthetic construct
  misc_feature 1..2832: note = Variant of the Homo Sapiens Lysosomal alpha-glucosidase
  source 1..2832: mol_type = other DNA
atggaatggagctgggtctttctcttcttcctgtcagtaacgactggtgtccactccggacacattctgtggcatgattttaagaccgtgcctagagagctttccggttcaagtcaagtcctcgaagaaacacatccagcccatcaggttggcgcatctaggccgggccctcgggacgctcaactccacccagggagacctagggccgttcccactcagtgcgacgtgccagagaactcacgcttcgattgtgcacctgagaaggctatcacgcaagagcagtgcgaggcccgcggatgttgttacataccggctaaacaggggctgcagggtgcgcagatgggccaaccttggtgcttcttcccaccatcctatccgagttacaagctggagaatctctcccagtctgaaatgggatataccgcaacactgactcggaccaccccctccttctttcccaaagatatcttgactctgagacttgacgtaatgatggagacagaaaacaggctccactttaccattaaggaccctgccaatcgccgatacgaggtgcctctggaaacaccacacgtgcacagtagagctccatcacctctgtattctgtcgagttctccgaagagccgtttggcgttatcgtcaggaggcagctcgacgggcgagtgcttctgaacacgactgtggccccgttgttctttgcggatcagtttctgcaactgtcaacaagtctcccttctcagtacattaccgggcttgcagagcatctgtccccactcatgctgagtacttcatggaacaaaatcacactgtggaatagagaccttgctcctactccaggagccaacttgtatggttctcaccctttctacttggccctggaagatggcggatcagcgcatggcgtattcctcctgaattccaacgcaatggacgttgttcttcagccatctcctgctttgagttggagatctacaggcgggatactggacgtctacatctttctgggtccagagcctaaatccgtagtgcagcagtatcttgatgtcgtcggatacccgtttatgccaccatattggggcctggggttccacttgtgccgctggggatattcatccaccgccattacacgacaagttgttgagaatatgaccagggcacattttcctctggatgtacagtggaacgacctggactacatggatagtcgccgcgacttcaccttcaataaggatgggttcagagactttcctgctatggtccaagaacttcaccagggaggcaggaggtacatgatgatcgtagatccgggaatttcttcttctggcccagccggttcatacagaccgtatgacgaaggactgcgacgaggcgtctttatcacgaacgagactggtcagcctttgataggcaaggtttggccagggtccaccgctttcccggatttcacaaatcctgaggcactggcctggtgggaagatatggtcgccgagtttcacgaccaggtcccatttgacgggatgtggatcgacatgaacgagccatccaacttcattagaggaagtgtggatggctgtccgaataatgagctggaaaaccctccttacgtaccaggcgttgttggtgggactcttcaagctgcgacgatttgcgcatcctcccatcagttcctgtcaacccactataacttgcacaatctgtacgggacaacagaggctatcgccagtcatagggccctggtaaaagctagaggaacacgccctttcgttatctctcgctcaacttttgcaggccacggtaggtatgccggacattggaccggcgacgtctggagttcttgggaacagctggcttcctccgttccagagatattgcagtttaacctgttgggagtcccacttgtaggtgcagatgtttgtggcttcctggggaacacctcagaagaattgtgcgtaagatggactcaactgggcgccttctacccttttatgcgcaatcacaactcactgacatctttgcctcaagaaccgtactcatttagtgagccagcacagcaggccatgaggaaggctcttggcctgagatatgcacttctgccgcatctgtacacccttttccaccaggctcatgtccatggagagactgttgcacgacctctgttcttggagttcccaaaagactcttccacgtggacagtcgatcaccagatgctgtggggcgaggctctgctgattacacctgtattgcaacctggtaaggccgaagttaccgggtactttccattggggacctggtatgatctgcaaacagtcccggttgaagctcttggaagtcttccacctccacctgctgcaccaagggagcctgcgatccactctgaaggacagtgggtaactttgcctgcaccgctggacaccatcaatgtccatctgcgcgaaggctacatcataccacttcaaggtcctggactgaccactacagagtctagaaaacaaccaatggctcttgctgttgcactgactaaaagcggcgaagcaaggggtgagctgttctgggacgacggagagtcactggaggtactcgaacgaggcgcgtatacgcaggtcatttttgaggctcgcaataatacgatcgttaacgagctggtccacgtcacttcagaaggtgcaggccttcagttgggcaaggtaactgtcctgggagttgctacagcaccgcagcaggtcttgtccaacggacggcccgtaagcaactttacctatagtcctgataccaaagttctggacatctgcgttgctctgctgatgggtgagcagttcctggtatcatggtgc

SEQ ID NO: 292 - protein, 944 aa, synthetic construct
  REGION 1..944: note = Variant of the Homo Sapiens Lysosomal alpha-glucosidase
MEWSWVFLFFLSVTTGVHSGHILWHDFKTVPRELSGSSQVLEETHPAHQVGASRPGPRDAQLHPGRPRAVPTQCDVPENSRFDCAPEKAITQEQCEARGCCYIPAKQGLQGAQMGQPWCFFPPSYPSYKLENLSQSEMGYTATLTRTTPSFFPKDILTLRLDVMMETENRLHFTIKDPANRRYEVPLETPHVHSRAPSPLYSVEFSEEPFGVIVRRQLDGRVLLNTTVAPLFFADQFLQLSTSLPSQYITGLAEHLSPLMLSTSWNKITLWNRDLAPTPGANLYGSHPFYLALEDGGSAHGVFLLNSNAMDVVLQPSPALSWRSTGGILDVYIFLGPEPKSVVQQYLDVVGYPFMPPYWGLGFHLCRWGYSSTAITRQVVENMTRAHFPLDVQWNDLDYMDSRRDFTFNKDGFRDFPAMVQELHQGGRRYMMIVDPGISSSGPAGSYRPYDEGLRRGVFITNETGQPLIGKVWPGSTAFPDFTNPEALAWWEDMVAEFHDQVPFDGMWIDMNEPSNFIRGSVDGCPNNELENPPYVPGVVGGTLQAATICASSHQFLSTHYNLHNLYGTTEAIASHRALVKARGTRPFVISRSTFAGHGRYAGHWTGDVWSSWEQLASSVPEILQFNLLGVPLVGADVCGFLGNTSEELCVRWTQLGAFYPFMRNHNSLTSLPQEPYSFSEPAQQAMRKALGLRYALLPHLYTLFHQAHVHGETVARPLFLEFPKDSSTWTVDHQMLWGEALLITPVLQPGKAEVTGYFPLGTWYDLQTVPVEALGSLPPPPAAPREPAIHSEGQWVTLPAPLDTINVHLREGYIIPLQGPGLTTTESRKQPMALAVALTKSGEARGELFWDDGESLEVLERGAYTQVIFEARNNTIVNELVHVTSEGAGLQLGKVTVLGVATAPQQVLSNGRPVSNFTYSPDTKVLDICVALLMGEQFLVSWC

SEQ ID NO: 293 - DNA, 2832 bp, synthetic construct
  misc_feature 1..2832: note = Variant of the Homo Sapiens Lysosomal alpha-glucosidase
  source 1..2832: mol_type = other DNA
atggaatggagctgggtctttctcttcttcctgtcagtaacgactggtgtccactccggacacattctgtggcatgatttttctaccgtgcctagagagctttccggttcaagtcaagtcctcgaagaaacacatccagcccatcaggttggcgcatctaggccgggccctcgggacgctcaactccacccagggagacctagggccgttcccactcagtgcgacgtgccagagaactcacgcttcgattgtgcacctgagaaggctatcacgcaagagcagtgcgaggcccgcggatgttgttacataccggctaaacaggggctgcagggtgcgcagatgggccaaccttggtgcttcttcccaccatcctatccgagttacaagctggagaatctctcccagtctgaaatgggatataccgcaacactgactcggaccaccccctccttctttcccaaagatatcttgactctgagacttgacgtaatgatggagacagaaaacaggctccactttaccattaaggaccctgccaatcgccgatacgaggtgcctctggaaacaccacacgtgcacagtagagctccatcacctctgtattctgtcgagttctccgaagagccgtttggcgttatcgtcaggaggcagctcgacgggcgagtgcttctgaacacgactgtggccccgttgttctttgcggatcagtttctgcaactgtcaacaagtctcccttctcagtacattaccgggcttgcagagcatctgtccccactcatgctgagtacttcatggaacaaaatcacactgtggaatagagaccttgctcctactccaggagccaacttgtatggttctcaccctttctacttggccctggaagatggcggatcagcgcatggcgtattcctcctgaattccaacgcaatggacgttgttcttcagccatctcctgctttgagttggagatctacaggcgggatactggacgtctacatctttctgggtccagagcctaaatccgtagtgcagcagtatcttgatgtcgtcggatacccgtttatgccaccatattggggcctggggttccacttgtgccgctggggatattcatccaccgccattacacgacaagttgttgagaatatgaccagggcacattttcctctggatgtacagtggaacgacctggactacatggatagtcgccgcgacttcaccttcaataaggatgggttcagagactttcctgctatggtccaagaacttcaccagggaggcaggaggtacatgatgatcgtagatccgggaatttcttcttctggcccagccggttcatacagaccgtatgacgaaggactgcgacgaggcgtctttatcacgaacgagactggtcagcctttgataggcaaggtttggccagggtccaccgctttcccggatttcacaaatcctgaggcactggcctggtgggaagatatggtcgccgagtttcacgaccaggtcccatttgacgggatgtggatcgacatgaacgagccatccaacttcattagaggaagtgtggatggctgtccgaataatgagctggaaaaccctccttacgtaccaggcgttgttggtgggactcttcaagctgcgacgatttgcgcatcctcccatcagttcctgtcaacccactataacttgcacaatctgtacgggacaacagaggctatcgccagtcatagggccctggtaaaagctagaggaacacgccctttcgttatctctcgctcaacttttgcaggccacggtaggtatgccggacattggaccggcgacgtctggagttcttgggaacagctggcttcctccgttccagagatattgcagtttaacctgttgggagtcccacttgtaggtgcagatgtttgtggcttcctggggaacacctcagaagaattgtgcgtaagatggactcaactgggcgccttctacccttttatgcgcaatcacaactcactgacatctttgcctcaagaaccgtactcatttagtgagccagcacagcaggccatgaggaaggctcttggcctgagatatgcacttctgccgcatctgtacacccttttccaccaggctcatgtccatggagagactgttgcacgacctctgttcttggagttcccaaaagactcttccacgtggacagtcgatcaccagatgctgtggggcgaggctctgctgattacacctgtattgcaacctggtaaggccgaagttaccgggtactttccattggggacctggtatgatctgcaaacagtcccggttgaagctcttggaagtcttccacctccacctgctgcaccaagggagcctgcgatccactctgaaggacagtgggtaactttgcctgcaccgctggacaccatcaatgtccatctgcgcgaaggctacatcataccacttcaaggtcctggactgaccactacagagtctagaaaacaaccaatggctcttgctgttgcactgactaaaagcggcgaagcaaggggtgagctgttctgggacgacggagagtcactggaggtactcgaacgaggcgcgtatacgcaggtcatttttaatgctcgcaataatacgatcgttaacgagctggtccacgtcacttcagaaggtgcaggccttcagttgggcaaggtaactgtcctgggagttgctacagcaccgcagcaggtcttgtccaacggacggcccgtaagcaactttacctatagtcctgataccaaagttctggacatctgcgttgctctgctgatgggtgagcagttcctggtatcatggtgc

SEQ ID NO: 294 - protein, 944 aa, synthetic construct
  REGION 1..944: note = Variant of the Homo Sapiens Lysosomal alpha-glucosidase
MEWSWVFLFFLSVTTGVHSGHILWHDFSTVPRELSGSSQVLEETHPAHQVGASRPGPRDAQLHPGRPRAVPTQCDVPENSRFDCAPEKAITQEQCEARGCCYIPAKQGLQGAQMGQPWCFFPPSYPSYKLENLSQSEMGYTATLTRTTPSFFPKDILTLRLDVMMETENRLHFTIKDPANRRYEVPLETPHVHSRAPSPLYSVEFSEEPFGVIVRRQLDGRVLLNTTVAPLFFADQFLQLSTSLPSQYITGLAEHLSPLMLSTSWNKITLWNRDLAPTPGANLYGSHPFYLALEDGGSAHGVFLLNSNAMDVVLQPSPALSWRSTGGILDVYIFLGPEPKSVVQQYLDVVGYPFMPPYWGLGFHLCRWGYSSTAITRQVVENMTRAHFPLDVQWNDLDYMDSRRDFTFNKDGFRDFPAMVQELHQGGRRYMMIVDPGISSSGPAGSYRPYDEGLRRGVFITNETGQPLIGKVWPGSTAFPDFTNPEALAWWEDMVAEFHDQVPFDGMWIDMNEPSNFIRGSVDGCPNNELENPPYVPGVVGGTLQAATICASSHQFLSTHYNLHNLYGTTEAIASHRALVKARGTRPFVISRSTFAGHGRYAGHWTGDVWSSWEQLASSVPEILQFNLLGVPLVGADVCGFLGNTSEELCVRWTQLGAFYPFMRNHNSLTSLPQEPYSFSEPAQQAMRKALGLRYALLPHLYTLFHQAHVHGETVARPLFLEFPKDSSTWTVDHQMLWGEALLITPVLQPGKAEVTGYFPLGTWYDLQTVPVEALGSLPPPPAAPREPAIHSEGQWVTLPAPLDTINVHLREGYIIPLQGPGLTTTESRKQPMALAVALTKSGEARGELFWDDGESLEVLERGAYTQVIFNARNNTIVNELVHVTSEGAGLQLGKVTVLGVATAPQQVLSNGRPVSNFTYSPDTKVLDICVALLMGEQFLVSWC

SEQ ID NO: 295 - DNA, 2832 bp, synthetic construct
  misc_feature 1..2832: note = Variant of the Homo Sapiens Lysosomal alpha-glucosidase
  source 1..2832: mol_type = other DNA
atggaatggagctgggtctttctcttcttcctgtcagtaacgactggtgtccactccggacacattctgtggcatgatttttctaccgtgcctagagagctttccggttcaagtcaagtcctcgaagaaacacatccagcccatcagctgggcgcatctaggccgggccctcgggacgctcaactccacccagggagacctagggccgttcccactcagtgcgacgtgccagagaactcacgcttcgattgtgcacctgagaaggctatcacgcaagagcagtgcgaggcccgcggatgttgttacataccggctaaacaggggctgcagggtgcgcagatgggccaaccttggtgcttcttcccaccatcctatccgagttacaagctggagaatctctcccagtctgaaatgggatataccgcaacactgactcggaccaccccctccttctttcccaaagatatcttgactctgagacttgacgtaatgatggagacagaaaacaggctccactttaccattaaggaccctgccaatcgccgatacgaggtgcctctggaaacaccacacgtgcacagtagagctccatcacctctgtattctgtcgagttctccgaagagccgtttggcgttatcgtcaggaggcagctcgacgggcgagtgcttctgaacacgactgtggccccgttgttctttgcggatcagtttctgcaactgtcaacaagtctcccttctcagtacattaccgggcttgcagagcatctgtccccactcatgctgagtacttcatggaacaaaatcacactgtggaatagagaccttgctcctactccaggagccaacttgtatggttctcaccctttctacttggccctggaagatggcggatcagcgcatggcgtattcctcctgaattccaacgcaatggacgttgttcttcagccatctcctgctttgagttggagatctacaggcgggatactggacgtctacatctttctgggtccagagcctaaatccgtagtgcagcagtatcttgatgtcgtcggatacccgtttatgccaccatattggggcctggggttccacttgtgccgctggggatattcatccaccgccattacacgacaagttgttgagaatatgaccagggcacattttcctctggatgtacagtggaacgacctggactacatggatagtcgccgcgacttcaccttcaataaggatgggttcagagactttcctgctatggtccaagaacttcaccagggaggcaggaggtacatgatgatcgtagatccgggaatttcttcttctggcccagccggttcatacagaccgtatgacgaaggactgcgacgaggcgtctttatcacgaacgagactggtcagcctttgataggcaaggtttggccagggtccaccgctttcccggatttcacaaatcctgaggcactggcctggtgggaagatatggtcgccgagtttcacgaccaggtcccatttgacgggatgtggatcgacatgaacgagccatccaacttcattagaggaagtgtggatggctgtccgaataatgagctggaaaaccctccttacgtaccaggcgttgttggtgggactcttcaagctgcgacgatttgcgcatcctcccatcagttcctgtcaacccactataacttgcacaatctgtacgggacaacagaggctatcgccagtcatagggccctggtaaaagctagaggaacacgccctttcgttatctctcgctcaacttttgcaggccacggtaggtatgccggacattggaccggcgacgtctggagttcttgggaacagctggcttcctccgttccagagatattgcagtttaacctgttgggagtcccacttgtaggtgcagatgtttgtggcttcctggggaacacctcagaagaattgtgcgtaagatggactcaactgggcgccttctacccttttatgcgcaatcacaactcactgacatctttgcctcaagaaccgtactcatttagtgagccagcacagcaggccatgaggaaggctcttggcctgagatatgcacttctgccgcatctgtacacccttttccaccaggctcatgtccatggagagactgttgcacgacctctgttcttggagttcccaaaagactcttccacgtggacagtcgatcaccagatgctgtggggcgaggctctgctgattacacctgtattgcaacctggtaaggccgaagttaccgggtactttccattggggacctggtatgatctgcaaacagtcccggttgaagctcttggaagtcttccacctccacctgctgcaccaagggagcctgcgatccactctgaaggacagtgggtaactttgcctgcaccgctggacaccatcaatgtccatctgcgcgaaggctacatcataccacttcaaggtcctggactgaccactacagagtctagaaaacaaccaatggctcttgctgttgcactgactaaaagcggcgaagcaaggggtgagctgttctgggacgacggagagtcactggaggtactcgaacgaggcgcgtatacgcaggtcatttttgaggctcgcaataatacgatcgttaacgagctggtccacgtcacttcagaaggtgcaggccttcagttgggcaaggtaactgtcctgggagttgctacagcaccgcagcaggtcttgtccaacggacggcccgtaagcaactttacctatagtcctgataccaaagttctggacatctgcgttgctctgctgatgggtgagcagttcctggtatcatggtgc

SEQ ID NO: 296 - protein, 944 aa, synthetic construct
  REGION 1..944: note = Variant of the Homo Sapiens Lysosomal alpha-glucosidase
MEWSWVFLFFLSVTTGVHSGHILWHDFSTVPRELSGSSQVLEETHPAHQLGASRPGPRDAQLHPGRPRAVPTQCDVPENSRFDCAPEKAITQEQCEARGCCYIPAKQGLQGAQMGQPWCFFPPSYPSYKLENLSQSEMGYTATLTRTTPSFFPKDILTLRLDVMMETENRLHFTIKDPANRRYEVPLETPHVHSRAPSPLYSVEFSEEPFGVIVRRQLDGRVLLNTTVAPLFFADQFLQLSTSLPSQYITGLAEHLSPLMLSTSWNKITLWNRDLAPTPGANLYGSHPFYLALEDGGSAHGVFLLNSNAMDVVLQPSPALSWRSTGGILDVYIFLGPEPKSVVQQYLDVVGYPFMPPYWGLGFHLCRWGYSSTAITRQVVENMTRAHFPLDVQWNDLDYMDSRRDFTFNKDGFRDFPAMVQELHQGGRRYMMIVDPGISSSGPAGSYRPYDEGLRRGVFITNETGQPLIGKVWPGSTAFPDFTNPEALAWWEDMVAEFHDQVPFDGMWIDMNEPSNFIRGSVDGCPNNELENPPYVPGVVGGTLQAATICASSHQFLSTHYNLHNLYGTTEAIASHRALVKARGTRPFVISRSTFAGHGRYAGHWTGDVWSSWEQLASSVPEILQFNLLGVPLVGADVCGFLGNTSEELCVRWTQLGAFYPFMRNHNSLTSLPQEPYSFSEPAQQAMRKALGLRYALLPHLYTLFHQAHVHGETVARPLFLEFPKDSSTWTVDHQMLWGEALLITPVLQPGKAEVTGYFPLGTWYDLQTVPVEALGSLPPPPAAPREPAIHSEGQWVTLPAPLDTINVHLREGYIIPLQGPGLTTTESRKQPMALAVALTKSGEARGELFWDDGESLEVLERGAYTQVIFEARNNTIVNELVHVTSEGAGLQLGKVTVLGVATAPQQVLSNGRPVSNFTYSPDTKVLDICVALLMGEQFLVSWC

SEQ ID NO: 297 - DNA, 2832 bp, synthetic construct
  misc_feature 1..2832: note = Variant of the Homo Sapiens Lysosomal alpha-glucosidase
  source 1..2832: mol_type = other DNA
atggaatggagctgggtctttctcttcttcctgtcagtaacgactggtgtccactccggacacattctgtggcatgatttttctaccgtgcctagagagctttccggttcaagtcaagtcctcgaagaaacacatccagcccatcaggttggcgcatctaggccgggccctcgggacgctcaactccacccagggagacctagggccgttcccactcagtgcgacgtgccagagaactcacgcttcgattgtgcacctgagaaggctatcacgcaagagcagtgcgaggcccgcggatgttgttacataccggctaaacaggggctgcagggtgcgcagatgggccaaccttggtgcttcttcccaccatcctatccgagttacaagctggagaatctctcccagtctgaaatgggatataccgcaacactgactcggaccaccccctccttctttcccaaagatatcttgactctgagacttgacgtaatgatggagacagaaaacaggctccactttaccattaaggaccctgccaatcgccgatacgaggtgcctctggaaacaccacacgtgcacagtagagctccatcacctctgtattctgtcgagttctccgaagagccgtttggcgttatcgtcaggaggcagctcgacgggcgagtgcttctgaacacgactgtggccccgttgttctttgcggatcagtttctgcaactgtcaacaagtctcccttctcagtacattaccgggcttgcagagcatctgtccccactcatgctgagtacttcatggaacaaaatcacactgtggaatagagaccttgctcctactccaggagccaacttgtatggttctcaccctttctacttggccctggaagatggcggatcagcgcatggcgtattcctcctgaattccaacgcaatggacgttgttcttcagccatctcctgctttgagttggagatctacaggcgggatactggacgtctacatctttctgggtccagagcctaaatccgtagtgcagcagtatcttgatgtcgtcggatacccgtttatgccaccatattggggcctggggttccacttgtgccgctggggatattcatccaccgccattacacgacaagttgttgagaatatgaccagggcacattttcctctggatgtacagtggaacgacctggactacatggatagtcgccgcgacttcaccttcaataaggatgggttcagagactttcctgctatggtccaagaacttcaccagggaggcaggaggtacatgatgatcgtagatccgggaatttcttcttctggcccagccggttcatacagaccgtatgacgaaggactgcgacgaggcgtctttatcacgaacgagactggtcagcctttgataggcaaggtttggccagggtccaccgctttcccggatttcacaaatcctgaggcactggcctggtgggaagatatggtcgccgagtttcacgaccaggtcccatttgacgggatgtggatcgacatgaacgagccatccaacttcattagaggaagtgtggatggctgtccgaataatgagctggaaaaccctccttacgtaccaggcgttgttggtgggactcttcaagctgcgacgatttgcgcatcctcccatcagttcctgtcaacccactataacttgcacaatctgtacgggacaacagaggctatcgccagtcatagggccctggtaaaagctagaggaacacgccctttcgttatctctcgctcaacttttgcaggccacggtaggtatgccggacattggaccggcgacgtctggagttcttgggaacagctggcttcctccgttccagagatattgcagtttaacctgttgggagtcccacttgtaggtgcagatgtttgtggcttcctggggaacacctcagaagaattgtgcgtaagatggactcaactgggcgccttctacccttttatgcgcaatcacaactcactgacatctttgcctcaagaaccgtactcatttagtgagccagcacagcaggccatgaggaaggctcttggcctgagatatgcacttctgccgcatctgtacacccttttccaccaggctcatgtccatggagagactgttgcacgacctctgttcttggagttcccaaaagactcttccacgtggacagtcgatcaccagatgctgtggggcgaggctctgctgattacacctgtattgcaacctggtaaggccgaagttaccgggtactttccattggggacctggtatgatctgcaaacagtcccggttgaagctcttggaagtcttccacctccacctgctgcaccaagggagcctgcgatccactctgaaggacagtgggtaactttgcctgcaccgctggacaccatcaatgtccatctgcgcgaaggctacatcataccacttcaaggtcctggactgaccactacagagtctagaaaacaaccaatggctcttgctgttgcactgactaaaagcggcgaagcaaggggtgagctgttctgggacgacggagagtcactggaggtactcgaacgaggcgcgtatacgcaggtcatttttgaggctcgcaataatacgatcgttaacgagctggtccacgtcacttcagaaggtgcaggccttcagttgggcaaggtaactgtcctgggagttgctacagcaccgcagcaggtcttgtccaacggacggcccgtaagcaactttacctatagtcctgataccaaagttctggacatctgcgttcagctgctgatgggtgagcagttcctggtatcatggtgc

SEQ ID NO: 298 - protein, 944 aa, synthetic construct
  REGION 1..944: note = Variant of the Homo Sapiens Lysosomal alpha-glucosidase
MEWSWVFLFFLSVTTGVHSGHILWHDFSTVPRELSGSSQVLEETHPAHQVGASRPGPRDAQLHPGRPRAVPTQCDVPENSRFDCAPEKAITQEQCEARGCCYIPAKQGLQGAQMGQPWCFFPPSYPSYKLENLSQSEMGYTATLTRTTPSFFPKDILTLRLDVMMETENRLHFTIKDPANRRYEVPLETPHVHSRAPSPLYSVEFSEEPFGVIVRRQLDGRVLLNTTVAPLFFADQFLQLSTSLPSQYITGLAEHLSPLMLSTSWNKITLWNRDLAPTPGANLYGSHPFYLALEDGGSAHGVFLLNSNAMDVVLQPSPALSWRSTGGILDVYIFLGPEPKSVVQQYLDVVGYPFMPPYWGLGFHLCRWGYSSTAITRQVVENMTRAHFPLDVQWNDLDYMDSRRDFTFNKDGFRDFPAMVQELHQGGRRYMMIVDPGISSSGPAGSYRPYDEGLRRGVFITNETGQPLIGKVWPGSTAFPDFTNPEALAWWEDMVAEFHDQVPFDGMWIDMNEPSNFIRGSVDGCPNNELENPPYVPGVVGGTLQAATICASSHQFLSTHYNLHNLYGTTEAIASHRALVKARGTRPFVISRSTFAGHGRYAGHWTGDVWSSWEQLASSVPEILQFNLLGVPLVGADVCGFLGNTSEELCVRWTQLGAFYPFMRNHNSLTSLPQEPYSFSEPAQQAMRKALGLRYALLPHLYTLFHQAHVHGETVARPLFLEFPKDSSTWTVDHQMLWGEALLITPVLQPGKAEVTGYFPLGTWYDLQTVPVEALGSLPPPPAAPREPAIHSEGQWVTLPAPLDTINVHLREGYIIPLQGPGLTTTESRKQPMALAVALTKSGEARGELFWDDGESLEVLERGAYTQVIFEARNNTIVNELVHVTSEGAGLQLGKVTVLGVATAPQQVLSNGRPVSNFTYSPDTKVLDICVQLLMGEQFLVSWC

SEQ ID NO: 299 - DNA, 2832 bp, synthetic construct
  misc_feature 1..2832: note = Variant of the Homo Sapiens Lysosomal alpha-glucosidase
  source 1..2832: mol_type = other DNA
atggaatggagctgggtctttctcttcttcctgtcagtaacgactggtgtccactccggacacattctgtggcatgatttttctctggtgcctagagagctttccggttcaagtcaagtcctcgaagaaacacatccagcccatcaggttggcgcatctaggccgggccctcgggacgctcaactccacccagggagacctagggccgttcccactcagtgcgacgtgccagagaactcacgcttcgattgtgcacctgagaaggctatcacgcaagagcagtgcgaggcccgcggatgttgttacataccggctaaacaggggctgcagggtgcgcagatgggccaaccttggtgcttcttcccaccatcctatccgagttacaagctggagaatctctcccagtctgaaatgggatataccgcaacactgactcggaccaccccctccttctttcccaaagatatcttgactctgagacttgacgtaatgatggagacagaaaacaggctccactttaccattaaggaccctgccaatcgccgatacgaggtgcctctggaaacaccacacgtgcacagtagagctccatcacctctgtattctgtcgagttctccgaagagccgtttggcgttatcgtcaggaggcagctcgacgggcgagtgcttctgaacacgactgtggccccgttgttctttgcggatcagtttctgcaactgtcaacaagtctcccttctcagtacattaccgggcttgcagagcatctgtccccactcatgctgagtacttcatggaacaaaatcacactgtggaatagagaccttgctcctactccaggagccaacttgtatggttctcaccctttctacttggccctggaagatggcggatcagcgcatggcgtattcctcctgaattccaacgcaatggacgttgttcttcagccatctcctgctttgagttggagatctacaggcgggatactggacgtctacatctttctgggtccagagcctaaatccgtagtgcagcagtatcttgatgtcgtcggatacccgtttatgccaccatattggggcctggggttccacttgtgccgctggggatattcatccaccgccattacacgacaagttgttgagaatatgaccagggcacattttcctctggatgtacagtggaacgacctggactacatggatagtcgccgcgacttcaccttcaataaggatgggttcagagactttcctgctatggtccaagaacttcaccagggaggcaggaggtacatgatgatcgtagatccgggaatttcttcttctggcccagccggttcatacagaccgtatgacgaaggactgcgacgaggcgtctttatcacgaacgagactggtcagcctttgataggcaaggtttggccagggtccaccgctttcccggatttcacaaatcctgaggcactggcctggtgggaagatatggtcgccgagtttcacgaccaggtcccatttgacgggatgtggatcgacatgaacgagccatccaacttcattagaggaagtgtggatggctgtccgaataatgagctggaaaaccctccttacgtaccaggcgttgttggtgggactcttcaagctgcgacgatttgcgcatcctcccatcagttcctgtcaacccactataacttgcacaatctgtacgggacaacagaggctatcgccagtcatagggccctggtaaaagctagaggaacacgccctttcgttatctctcgctcaacttttgcaggccacggtaggtatgccggacattggaccggcgacgtctggagttcttgggaacagctggcttcctccgttccagagatattgcagtttaacctgttgggagtcccacttgtaggtgcagatgtttgtggcttcctggggaacacctcagaagaattgtgcgtaagatggactcaactgggcgccttctacccttttatgcgcaatcacaactcactgacatctttgcctcaagaaccgtactcatttagtgagccagcacagcaggccatgaggaaggctcttggcctgagatatgcacttctgccgcatctgtacacccttttccaccaggctcatgtccatggagagactgttgcacgacctctgttcttggagttcccaaaagactcttccacgtggacagtcgatcaccagatgctgtggggcgaggctctgctgattacacctgtattgcaacctggtaaggccgaagttaccgggtactttccattggggacctggtatgatctgcaaacagtcccggttgaagctcttggaagtcttccacctccacctgctgcaccaagggagcctgcgatccactctgaaggacagtgggtaactttgcctgcaccgctggacaccatcaatgtccatctgcgcgaaggctacatcataccacttcaaggtcctggactgaccactacagagtctagaaaacaaccaatggctcttgctgttgcactgactaaaagcggcgaagcaaggggtgagctgttctgggacgacggagagtcactggaggtactcgaacgaggcgcgtatacgcaggtcatttttgaggctcgcaataatacgatcgttaacgagctggtccacgtcacttcagaaggtgcaggccttcagttgggcaaggtaactgtcctgggagttgctacagcaccgcagcaggtcttgtccaacggacggcccgtaagcaactttacctatagtcctgataccaaagttctggacatctgcgttgctctgctgatgggtgagcagttcctggtatcatggtgc

SEQ ID NO: 300 - protein, 944 aa, synthetic construct
  REGION 1..944: note = Variant of the Homo Sapiens Lysosomal alpha-glucosidase
MEWSWVFLFFLSVTTGVHSGHILWHDFSLVPRELSGSSQVLEETHPAHQVGASRPGPRDAQLHPGRPRAVPTQCDVPENSRFDCAPEKAITQEQCEARGCCYIPAKQGLQGAQMGQPWCFFPPSYPSYKLENLSQSEMGYTATLTRTTPSFFPKDILTLRLDVMMETENRLHFTIKDPANRRYEVPLETPHVHSRAPSPLYSVEFSEEPFGVIVRRQLDGRVLLNTTVAPLFFADQFLQLSTSLPSQYITGLAEHLSPLMLSTSWNKITLWNRDLAPTPGANLYGSHPFYLALEDGGSAHGVFLLNSNAMDVVLQPSPALSWRSTGGILDVYIFLGPEPKSVVQQYLDVVGYPFMPPYWGLGFHLCRWGYSSTAITRQVVENMTRAHFPLDVQWNDLDYMDSRRDFTFNKDGFRDFPAMVQELHQGGRRYMMIVDPGISSSGPAGSYRPYDEGLRRGVFITNETGQPLIGKVWPGSTAFPDFTNPEALAWWEDMVAEFHDQVPFDGMWIDMNEPSNFIRGSVDGCPNNELENPPYVPGVVGGTLQAATICASSHQFLSTHYNLHNLYGTTEAIASHRALVKARGTRPFVISRSTFAGHGRYAGHWTGDVWSSWEQLASSVPEILQFNLLGVPLVGADVCGFLGNTSEELCVRWTQLGAFYPFMRNHNSLTSLPQEPYSFSEPAQQAMRKALGLRYALLPHLYTLFHQAHVHGETVARPLFLEFPKDSSTWTVDHQMLWGEALLITPVLQPGKAEVTGYFPLGTWYDLQTVPVEALGSLPPPPAAPREPAIHSEGQWVTLPAPLDTINVHLREGYIIPLQGPGLTTTESRKQPMALAVALTKSGEARGELFWDDGESLEVLERGAYTQVIFEARNNTIVNELVHVTSEGAGLQLGKVTVLGVATAPQQVLSNGRPVSNFTYSPDTKVLDICVALLMGEQFLVSWC

SEQ ID NO: 301 - DNA, 2832 bp, synthetic construct
  misc_feature 1..2832: note = Variant of the Homo Sapiens Lysosomal alpha-glucosidase
  source 1..2832: mol_type = other DNA
atggaatggagctgggtctttctcttcttcctgtcagtaacgactggtgtccactccggacacattctgtggcatgatttttctaccgtgcctagagagctttccggttcaagtcaagtcctcgaagaaacacatccagcccatcaggttggcgcatctaggccgggccctcgggacgctcaactccacccagggagacctagggccgttcccactcagtgcgacgtgccagagaactcacgcttcgattgtgcacctgagaaggctatcacgcaagagcagtgcgaggcccgcggatgttgttacataccggctaaacaggggctgcagggtgcgcagatgggccaaccttggtgcttcttcccaccatcctatccgagttacaagctggagaatctctcccagtctgaaatgggatataccgcaacactgactcggaccaccccctccttctttcccaaagatatcttgactctgagacttgacgtaatgatggagacagaaaacaggctccactttaccattaaggaccctgccaatcgccgatacgaggtgcctctggaaacaccacacgtgcacagtagagctccatcacctctgtattctgtcgagttctccgaagagccgtttggcgttatcgtcaggaggcagctcgacgggcgagtgcttctgaacacgactgtggccccgttgttctttgcggatcagtttctgcaactgtcaacaagtctcccttctcagtacattaccgggcttgcagagcatctgtccccactcatgctgagtacttcatggaacaaaatcacactgtggaatagagaccttgctcctactccaggagccaacttgtatggttctcaccctttctacttggccctggaagatggcggatcagcgcatggcgtattcctcctgaattccaacgcaatggacgttgttcttcagccatctcctgctttgagttggagatctacaggcgggatactggacgtctacatctttctgggtccagagcctaaatccgtagtgcagcagtatcttgatgtcgtcggatacccgtttatgccaccatattggggcctggggttccacttgtgccgctggggatattcatccaccgccattacacgacaagttgttgagaatatgaccagggcacattttcctctggatgtacagtggaacgacctggactacatggatagtcgccgcgacttcaccttcaataaggatgggttcagagactttcctgctatggtccaagaacttcaccagggaggcaggaggtacatgatgatcgtagatccgggaatttcttcttctggcccagccggttcatacagaccgtatgacgaaggactgcgacgaggcgtctttatcacgaacgagactggtcagcctttgataggcaaggtttggccagggtccaccgctttcccggatttcacaaatcctgaggcactggcctggtgggaagatatggtcgccgagtttcacgaccaggtcccatttgacgggatgtggatcgacatgaacgagccatccaacttcattagaggaagtgtggatggctgtccgaataatgagctggaaaaccctccttacgtaccaggcgttgttggtgggactcttcaagctgcgacgatttgcgcatcctcccatcagttcctgtcaacccactataacttgcacaatctgtacgggacaacagaggctatcgccagtcatagggccctggtaaaagctagaggaacacgccctttcgttatctctcgctcaacttttgcaggccacggtaggtatgccggacattggaccggcgacgtctggagttcttgggaacagctggcttcctccgttccagagatattgcagtttaacctgttgggagtcccacttgtaggtgcagatgtttgtggcttcctggggaacacctcagaagaattgtgcgtaagatggactcaactgggcgccttctacccttttatgcgcaatcacaactcactgacatctttgcctcaagaaccgtactcatttagtgagccagcacagcaggccatgaggaaggctcttggcctgagatatgcacttctgccgcatctgtacacccttttccaccaggctcatgtctttggagagactgttgcacgacctctgttcttggagttcccaaaagactcttccacgtggacagtcgatcaccagatgctgtggggcgaggctctgctgattacacctgtattgcaacctggtaaggccgaagttaccgggtactttccattggggacctggtatgatctgcaaacagtcccggttgaagctcttggaagtcttccacctccacctgctgcaccaagggagcctgcgatccactctgaaggacagtgggtaactttgcctgcaccgctggacaccatcaatgtccatctgcgcgaaggctacatcataccacttcaaggtcctggactgaccactacagagtctagaaaacaaccaatggctcttgctgttgcactgactaaaagcggcgaagcaaggggtgagctgttctgggacgacggagagtcactggaggtactcgaacgaggcgcgtatacgcaggtcatttttgaggctcgcaataatacgatcgttaacgagctggtccacgtcacttcagaaggtgcaggccttcagttgggcaaggtaactgtcctgggagttgctacagcaccgcagcaggtcttgtccaacggacggcccgtaagcaactttacctatagtcctgataccaaagttctggacatctgcgttgctctgctgatgggtgagcagttcctggtatcatggtgc

SEQ ID NO: 302 - protein, 944 aa, synthetic construct
  REGION 1..944: note = Variant of the Homo Sapiens Lysosomal alpha-glucosidase
MEWSWVFLFFLSVTTGVHSGHILWHDFSTVPRELSGSSQVLEETHPAHQVGASRPGPRDAQLHPGRPRAVPTQCDVPENSRFDCAPEKAITQEQCEARGCCYIPAKQGLQGAQMGQPWCFFPPSYPSYKLENLSQSEMGYTATLTRTTPSFFPKDILTLRLDVMMETENRLHFTIKDPANRRYEVPLETPHVHSRAPSPLYSVEFSEEPFGVIVRRQLDGRVLLNTTVAPLFFADQFLQLSTSLPSQYITGLAEHLSPLMLSTSWNKITLWNRDLAPTPGANLYGSHPFYLALEDGGSAHGVFLLNSNAMDVVLQPSPALSWRSTGGILDVYIFLGPEPKSVVQQYLDVVGYPFMPPYWGLGFHLCRWGYSSTAITRQVVENMTRAHFPLDVQWNDLDYMDSRRDFTFNKDGFRDFPAMVQELHQGGRRYMMIVDPGISSSGPAGSYRPYDEGLRRGVFITNETGQPLIGKVWPGSTAFPDFTNPEALAWWEDMVAEFHDQVPFDGMWIDMNEPSNFIRGSVDGCPNNELENPPYVPGVVGGTLQAATICASSHQFLSTHYNLHNLYGTTEAIASHRALVKARGTRPFVISRSTFAGHGRYAGHWTGDVWSSWEQLASSVPEILQFNLLGVPLVGADVCGFLGNTSEELCVRWTQLGAFYPFMRNHNSLTSLPQEPYSFSEPAQQAMRKALGLRYALLPHLYTLFHQAHVFGETVARPLFLEFPKDSSTWTVDHQMLWGEALLITPVLQPGKAEVTGYFPLGTWYDLQTVPVEALGSLPPPPAAPREPAIHSEGQWVTLPAPLDTINVHLREGYIIPLQGPGLTTTESRKQPMALAVALTKSGEARGELFWDDGESLEVLERGAYTQVIFEARNNTIVNELVHVTSEGAGLQLGKVTVLGVATAPQQVLSNGRPVSNFTYSPDTKVLDICVALLMGEQFLVSWC

SEQ ID NO: 303 - DNA, 2832 bp, synthetic construct
  misc_feature 1..2832: note = Variant of the Homo Sapiens Lysosomal alpha-glucosidase
  source 1..2832: mol_type = other DNA
atggaatggagctgggtctttctcttcttcctgtcagtaacgactggtgtccactccggacacattctgtggcatgatttttctaccgtgcctagagagctttccggttcaagtcaagtcctcgaagaaacacatccagcccatcaggttggcgcatctaggccgggccctcgggacgctcaactccacccagggagacctagggccgttcccactcagtgcgacgtgccagagaactcacgcttcgattgtgcacctgagaaggctatcacgcaagagcagtgcgaggcccgcggatgttgttacataccggctaaacaggggctgcagggtgcgcagatgggccaaccttggtgcttcttcccaccatcctatccgagttacaagctggagaatctctcccagtctgaaatgggatataccgcaacactgactcggaccaccccctccttctttcccaaagatatcttgactctgagacttgacgtaatgatggagacagaaaacaggctccactttaccattaaggaccctgccaatcgccgatacgaggtgcctctggaaacaccacacgtgcacagtagagctccatcacctctgtattctgtcgagttctccgaagagccgtttggcgttatcgtcaggaggcagctcgacgggcgagtgcttctgaacacgactgtggccccgttgttctttgcggatcagtttctgcaactgtcaacaagtctcccttctcagtacattaccgggcttgcagagcatctgtccccactcatgctgagtacttcatggaacaaaatcacactgtggaatagagaccttgctcctactccaggagccaacttgtatggttctcaccctttctacttggccctggaagatggcggatcagcgcatggcgtattcctcctgaattccaacgcaatggacgttgttcttcagccatctcctgctttgagttggagatctacaggcgggatactggacgtctacatctttctgggtccagagcctaaatccgtagtgcagcagtatcttgatgtcgtcggatacccgtttatgccaccatattggggcctggggttccacttgtgccgctggggatattcatccaccgccattacacgacaagttgttgagaatatgaccagggcacattttcctctggatgtacagtggaacgacctggactacatggatagtcgccgcgacttcaccttcaataaggatgggttcagagactttcctgctatggtccaagaacttcaccagggaggcaggaggtacatgatgatcgtagatccgggaatttcttcttctggcccagccggttcatacagaccgtatgacgaaggactgcgacgaggcgtctttatcacgaacgagactggtcagcctttgataggcaaggtttggccagggtccaccgctttcccggatttcacaaatcctgaggcactggcctggtgggaagatatggtcgccgagtttcacgaccaggtcccatttgacgggatgtggatcgacatgaacgagccatccaacttcattagaggaagtgtggatggctgtccgaataatgagctggaaaaccctccttacgtaccaggcgttgttggtgggactcttcaagctgcgacgatttgcgcatcctcccatcagttcctgtcaacccactataacttgcacaatctgtacggggagacagaggctatcgccagtcatagggccctggtaaaagctagaggaacacgccctttcgttatctctcgctcaacttttgcaggccacggtaggtatgccggacattggaccggcgacgtctggagttcttgggaacagctggcttcctccgttccagagatattgcagtttaacctgttgggagtcccacttgtaggtgcagatgtttgtggcttcctggggaacacctcagaagaattgtgcgtaagatggactcaactgggcgccttctacccttttatgcgcaatcacaactcactgacatctttgcctcaagaaccgtactcatttagtgagccagcacagcaggccatgaggaaggctcttggcctgagatatgcacttctgccgcatctgtacacccttttccaccaggctcatgtccatggagagactgttgcacgacctctgttcttggagttcccaaaagactcttccacgtggacagtcgatcaccagatgctgtggggcgaggctctgctgattacacctgtattgcaacctggtaaggccgaagttaccgggtactttccattggggacctggtatgatctgcaaacagtcccggttgaagctcttggaagtcttccacctccacctgctgcaccaagggagcctgcgatccactctgaaggacagtgggtaactttgcctgcaccgctggacaccatcaatgtccatctgcgcgaaggctacatcataccacttcaaggtcctggactgaccactacagagtctagaaaacaaccaatggctcttgctgttgcactgactaaaagcggcgaagcaaggggtgagctgttctgggacgacggagagtcactggaggtactcgaacgaggcgcgtatacgcaggtcatttttgaggctcgcaataatacgatcgttaacgagctggtccacgtcacttcagaaggtgcaggccttcagttgggcaaggtaactgtcctgggagttgctacagcaccgcagcaggtcttgtccaacggacggcccgtaagcaactttacctatagtcctgataccaaagttctggacatctgcgttgctctgctgatgggtgagcagttcctggtatcatggtgc

SEQ ID NO: 304 - protein, 944 aa, synthetic construct
  REGION 1..944: note = Variant of the Homo Sapiens Lysosomal alpha-glucosidase
MEWSWVFLFFLSVTTGVHSGHILWHDFSTVPRELSGSSQVLEETHPAHQVGASRPGPRDAQLHPGRPRAVPTQCDVPENSRFDCAPEKAITQEQCEARGCCYIPAKQGLQGAQMGQPWCFFPPSYPSYKLENLSQSEMGYTATLTRTTPSFFPKDILTLRLDVMMETENRLHFTIKDPANRRYEVPLETPHVHSRAPSPLYSVEFSEEPFGVIVRRQLDGRVLLNTTVAPLFFADQFLQLSTSLPSQYITGLAEHLSPLMLSTSWNKITLWNRDLAPTPGANLYGSHPFYLALEDGGSAHGVFLLNSNAMDVVLQPSPALSWRSTGGILDVYIFLGPEPKSVVQQYLDVVGYPFMPPYWGLGFHLCRWGYSSTAITRQVVENMTRAHFPLDVQWNDLDYMDSRRDFTFNKDGFRDFPAMVQELHQGGRRYMMIVDPGISSSGPAGSYRPYDEGLRRGVFITNETGQPLIGKVWPGSTAFPDFTNPEALAWWEDMVAEFHDQVPFDGMWIDMNEPSNFIRGSVDGCPNNELENPPYVPGVVGGTLQAATICASSHQFLSTHYNLHNLYGETEAIASHRALVKARGTRPFVISRSTFAGHGRYAGHWTGDVWSSWEQLASSVPEILQFNLLGVPLVGADVCGFLGNTSEELCVRWTQLGAFYPFMRNHNSLTSLPQEPYSFSEPAQQAMRKALGLRYALLPHLYTLFHQAHVHGETVARPLFLEFPKDSSTWTVDHQMLWGEALLITPVLQPGKAEVTGYFPLGTWYDLQTVPVEALGSLPPPPAAPREPAIHSEGQWVTLPAPLDTINVHLREGYIIPLQGPGLTTTESRKQPMALAVALTKSGEARGELFWDDGESLEVLERGAYTQVIFEARNNTIVNELVHVTSEGAGLQLGKVTVLGVATAPQQVLSNGRPVSNFTYSPDTKVLDICVALLMGEQFLVSWC

SEQ ID NO: 305 - DNA, 2832 bp, synthetic construct
  misc_feature 1..2832: note = Variant of the Homo Sapiens Lysosomal alpha-glucosidase
  source 1..2832: mol_type = other DNA
atggaatggagctgggtctttctcttcttcctgtcagtaacgactggtgtccactccggacacattctgtggcatgatttttctaccgtgcctagagagctttccggttcaagtcaagtcctcgaagaaacacatccagcccatcaggttggcgcatctaggccgggccctcgggacgctcaactccacccagggagacctagggccgttcccactcagtgcgacgtgccatttaactcacgcttcgattgtgcacctgagaaggctatcacgcaagagcagtgcgaggcccgcggatgttgttacataccggctaaacaggggctgcagggtgcgcagatgggccaaccttggtgcttcttcccaccatcctatccgagttacaagctggagaatctctcccagtctgaaatgggatataccgcaacactgactcggaccaccccctccttctttcccaaagatatcttgactctgagacttgacgtaatgatggagacagaaaacaggctccactttaccattaaggaccctgccaatcgccgatacgaggtgcctctggaaacaccacacgtgcacagtagagctccatcacctctgtattctgtcgagttctccgaagagccgtttggcgttatcgtcaggaggcagctcgacgggcgagtgcttctgaacacgactgtggccccgttgttctttgcggatcagtttctgcaactgtcaacaagtctcccttctcagtacattaccgggcttgcagagcatctgtccccactcatgctgagtacttcatggaacaaaatcacactgtggaatagagaccttgctcctactccaggagccaacttgtatggttctcaccctttctacttggccctggaagatggcggatcagcgcatggcgtattcctcctgaattccaacgcaatggacgttgttcttcagccatctcctgctttgagttggagatctacaggcgggatactggacgtctacatctttctgggtccagagcctaaatccgtagtgcagcagtatcttgatgtcgtcggatacccgtttatgccaccatattggggcctggggttccacttgtgccgctggggatattcatccaccgccattacacgacaagttgttgagaatatgaccagggcacattttcctctggatgtacagtggaacgacctggactacatggatagtcgccgcgacttcaccttcaataaggatgggttcagagactttcctgctatggtccaagaacttcaccagggaggcaggaggtacatgatgatcgtagatccgggaatttcttcttctggcccagccggttcatacagaccgtatgacgaaggactgcgacgaggcgtctttatcacgaacgagactggtcagcctttgataggcaaggtttggccagggtccaccgctttcccggatttcacaaatcctgaggcactggcctggtgggaagatatggtcgccgagtttcacgaccaggtcccatttgacgggatgtggatcgacatgaacgagccatccaacttcattagaggaagtgtggatggctgtccgaataatgagctggaaaaccctccttacgtaccaggcgttgttggtgggactcttcaagctgcgacgatttgcgcatcctcccatcagttcctgtcaacccactataacttgcacaatctgtacgggacaacagaggctatcgccagtcatagggccctggtaaaagctagaggaacacgccctttcgttatctctcgctcaacttttgcaggccacggtaggtatgccggacattggaccggcgacgtctggagttcttgggaacagctggcttcctccgttccagagatattgcagtttaacctgttgggagtcccacttgtaggtgcagatgtttgtggcttcctggggaacacctcagaagaattgtgcgtaagatggactcaactgggcgccttctacccttttatgcgcaatcacaactcactgacatctttgcctcaagaaccgtactcatttagtgagccagcacagcaggccatgaggaaggctcttggcctgagatatgcacttctgccgcatctgtacacccttttccaccaggctcatgtccatggagagactgttgcacgacctctgttcttggagttcccaaaagactcttccacgtggacagtcgatcaccagatgctgtggggcgaggctctgctgattacacctgtattgcaacctggtaaggccgaagttaccgggtactttccattggggacctggtatgatctgcaaacagtcccggttgaagctcttggaagtcttccacctccacctgctgcaccaagggagcctgcgatccactctgaaggacagtgggtaactttgcctgcaccgctggacaccatcaatgtccatctgcgcgaaggctacatcataccacttcaaggtcctggactgaccactacagagtctagaaaacaaccaatggctcttgctgttgcactgactaaaagcggcgaagcaaggggtgagctgttctgggacgacggagagtcactggaggtactcgaacgaggcgcgtatacgcaggtcatttttgaggctcgcaataatacgatcgttaacgagctggtccacgtcacttcagaaggtgcaggccttcagttgggcaaggtaactgtcctgggagttgctacagcaccgcagcaggtcttgtccaacggacggcccgtaagcaactttacctatagtcctgataccaaagttctggacatctgcgttgctctgctgatgggtgagcagttcctggtatcatggtgc

SEQ ID NO: 306 - protein, 944 aa, synthetic construct
  REGION 1..944: note = Variant of the Homo Sapiens Lysosomal alpha-glucosidase
MEWSWVFLFFLSVTTGVHSGHILWHDFSTVPRELSGSSQVLEETHPAHQVGASRPGPRDAQLHPGRPRAVPTQCDVPFNSRFDCAPEKAITQEQCEARGCCYIPAKQGLQGAQMGQPWCFFPPSYPSYKLENLSQSEMGYTATLTRTTPSFFPKDILTLRLDVMMETENRLHFTIKDPANRRYEVPLETPHVHSRAPSPLYSVEFSEEPFGVIVRRQLDGRVLLNTTVAPLFFADQFLQLSTSLPSQYITGLAEHLSPLMLSTSWNKITLWNRDLAPTPGANLYGSHPFYLALEDGGSAHGVFLLNSNAMDVVLQPSPALSWRSTGGILDVYIFLGPEPKSVVQQYLDVVGYPFMPPYWGLGFHLCRWGYSSTAITRQVVENMTRAHFPLDVQWNDLDYMDSRRDFTFNKDGFRDFPAMVQELHQGGRRYMMIVDPGISSSGPAGSYRPYDEGLRRGVFITNETGQPLIGKVWPGSTAFPDFTNPEALAWWEDMVAEFHDQVPFDGMWIDMNEPSNFIRGSVDGCPNNELENPPYVPGVVGGTLQAATICASSHQFLSTHYNLHNLYGTTEAIASHRALVKARGTRPFVISRSTFAGHGRYAGHWTGDVWSSWEQLASSVPEILQFNLLGVPLVGADVCGFLGNTSEELCVRWTQLGAFYPFMRNHNSLTSLPQEPYSFSEPAQQAMRKALGLRYALLPHLYTLFHQAHVHGETVARPLFLEFPKDSSTWTVDHQMLWGEALLITPVLQPGKAEVTGYFPLGTWYDLQTVPVEALGSLPPPPAAPREPAIHSEGQWVTLPAPLDTINVHLREGYIIPLQGPGLTTTESRKQPMALAVALTKSGEARGELFWDDGESLEVLERGAYTQVIFEARNNTIVNELVHVTSEGAGLQLGKVTVLGVATAPQQVLSNGRPVSNFTYSPDTKVLDICVALLMGEQFLVSWC

SEQ ID NO: 307 - DNA, 2832 bp, synthetic construct
  misc_feature 1..2832: note = Variant of the Homo Sapiens Lysosomal alpha-glucosidase
  source 1..2832: mol_type = other DNA
atggaatggagctgggtctttctcttcttcctgtcagtaacgactggtgtccactccggacacattctgtggcatgatttttctaccgtgcctagagagctttccggttcaagtcaagtcctcgaagaaacacatccagcccatcaggttggcgcatctaggccgggccctcgggacgctcaactccacccagggagacctagggccgttcccactcagtgcgacgtgccagagaactcacgcttcgattgtgcacctgagaaggctatcacgcaagagcagtgcgaggcccgcggatgttgttacataccggctaaacaggggctgcagggtgcgcagatgggccaaccttggtgcttcttcccaccatcctatccgagttacaagctggagaatctctcccagtctgaaatgggatataccgcaacactgactcggaccaccccctccttctttcccaaagatatcttgactctgagacttgacgtaatgatggagacagaaaacaggctccactttaccattaaggaccctgccaatcgccgatacgaggtgcctctggaaacaccacacgtgcacagtagagctccatcacctctgtattctgtcgagttctccgaagagccgtttggcgttatcgtcaggaggcagctcgacgggcgagtgcttctgaacacgactgtggccccgttgttctttgcggatcagtttctgcaactgtcaacaagtctcccttctcagtacattaccgggcttgcagagcatctgtccccactcatgctgagtacttcatggaacaaaatcacactgtggaatagagaccttgctcctactccaggagccaacttgtatggttctcaccctttctacttggccctggaagatggcggatcagcgcatggcgtattcctcctgaattccaacgcaatggacgttgttcttcagccatctcctgctttgagttggagatctacaggcgggatactggacgtctacatctttctgggtccagagcctaaatccgtagtgcagcagtatcttgatgtcgtcggatacccgtttatgccaccatattggggcctggggttccacttgtgccgctggggatattcatccaccgccattacacgacaagttgttgagaatatgaccagggcacattttcctctggatgtacagtggaacgacctggactacatggatagtcgccgcgacttcaccttcaataaggatgggttcagagactttcctgctatggtccaagaacttcaccagggaggcaggaggtacatgatgatcgtagatccgggaatttcttcttctggcccagccggttcatacagaccgtatgacgaaggactgcgacgaggcgtctttatcacgaacgagactggtcagcctttgataggcaaggtttggccagggtccaccgctttcccggatttcacaaatcctgaggcactggcctggtgggaagatatggtcgccgagtttcacgaccaggtcccatttgacgggatgtggatcgacatgaacgagccatccaacttcattagaggaagtagggatggctgtccgaataatgagctggaaaaccctccttacgtaccaggcgttgttggtgggactcttcaagctgcgacgatttgcgcatcctcccatcagttcctgtcaacccactataacttgcacaatctgtacgggacaacagaggctatcgccagtcatagggccctggtaaaagctagaggaacacgccctttcgttatctctcgctcaacttttgcaggccacggtaggtatgccggacattggaccggcgacgtctggagttcttgggaacagctggcttcctccgttccagagatattgcagtttaacctgttgggagtcccacttgtaggtgcagatgtttgtggcttcctggggaacacctcagaagaattgtgcgtaagatggactcaactgggcgccttctacccttttatgcgcaatcacaactcactgacatctttgcctcaagaaccgtactcatttagtgagccagcacagcaggccatgaggaaggctcttggcctgagatatgcacttctgccgcatctgtacacccttttccaccaggctcatgtccatggagagactgttgcacgacctctgttcttggagttcccaaaagactcttccacgtggacagtcgatcaccagatgctgtggggcgaggctctgctgattacacctgtattgcaacctggtaaggccgaagttaccgggtactttccattggggacctggtatgatctgcaaacagtcccggttgaagctcttggaagtcttccacctccacctgctgcaccaagggagcctgcgatccactctgaaggacagtgggtaactttgcctgcaccgctggacaccatcaatgtccatctgcgcgaaggctacatcataccacttcaaggtcctggactgaccactacagagtctagaaaacaaccaatggctcttgctgttgcactgactaaaagcggcgaagcaaggggtgagctgttctgggacgacggagagtcactggaggtactcgaacgaggcgcgtatacgcaggtcatttttgaggctcgcaataatacgatcgttaacgagctggtccacgtcacttcagaaggtgcaggccttcagttgggcaaggtaactgtcctgggagttgctacagcaccgcagcaggtcttgtccaacggacggcccgtaagcaactttacctatagtcctgataccaaagttctggacatctgcgttgctctgctgatgggtgagcagttcctggtatcatggtgc

SEQ ID NO: 308 - protein, 944 aa, synthetic construct
  REGION 1..944: note = Variant of the Homo Sapiens Lysosomal alpha-glucosidase
MEWSWVFLFFLSVTTGVHSGHILWHDFSTVPRELSGSSQVLEETHPAHQVGASRPGPRDAQLHPGRPRAVPTQCDVPENSRFDCAPEKAITQEQCEARGCCYIPAKQGLQGAQMGQPWCFFPPSYPSYKLENLSQSEMGYTATLTRTTPSFFPKDILTLRLDVMMETENRLHFTIKDPANRRYEVPLETPHVHSRAPSPLYSVEFSEEPFGVIVRRQLDGRVLLNTTVAPLFFADQFLQLSTSLPSQYITGLAEHLSPLMLSTSWNKITLWNRDLAPTPGANLYGSHPFYLALEDGGSAHGVFLLNSNAMDVVLQPSPALSWRSTGGILDVYIFLGPEPKSVVQQYLDVVGYPFMPPYWGLGFHLCRWGYSSTAITRQVVENMTRAHFPLDVQWNDLDYMDSRRDFTFNKDGFRDFPAMVQELHQGGRRYMMIVDPGISSSGPAGSYRPYDEGLRRGVFITNETGQPLIGKVWPGSTAFPDFTNPEALAWWEDMVAEFHDQVPFDGMWIDMNEPSNFIRGSRDGCPNNELENPPYVPGVVGGTLQAATICASSHQFLSTHYNLHNLYGTTEAIASHRALVKARGTRPFVISRSTFAGHGRYAGHWTGDVWSSWEQLASSVPEILQFNLLGVPLVGADVCGFLGNTSEELCVRWTQLGAFYPFMRNHNSLTSLPQEPYSFSEPAQQAMRKALGLRYALLPHLYTLFHQAHVHGETVARPLFLEFPKDSSTWTVDHQMLWGEALLITPVLQPGKAEVTGYFPLGTWYDLQTVPVEALGSLPPPPAAPREPAIHSEGQWVTLPAPLDTINVHLREGYIIPLQGPGLTTTESRKQPMALAVALTKSGEARGELFWDDGESLEVLERGAYTQVIFEARNNTIVNELVHVTSEGAGLQLGKVTVLGVATAPQQVLSNGRPVSNFTYSPDTKVLDICVALLMGEQFLVSWC

SEQ ID NO: 309 - DNA, 2832 bp, synthetic construct
  misc_feature 1..2832: note = Variant of the Homo Sapiens Lysosomal alpha-glucosidase
  source 1..2832: mol_type = other DNA
atggaatggagctgggtctttctcttcttcctgtcagtaacgactggtgtccactccggacacattctgtggcatgatttttctaccgtgcctagagagctttccggttcaagtcaagtcctcgaagaaacacatccagcccatcaggttggcgcatctaggccgggccctcgggacgctcaactccacccagggagacctagggccgttcccactcagtgcgacgtgccagagaactcacgcttcgattgtgcacctgagaaggctatcacgcaagagcagtgcgaggcccgcggatgttgttacataccggctaaacaggggctgcagggtgcgcagatgggccaaccttggtgcttcttcccaccatcctatccgagttacaagctggagaatctctcccagtctgaaatgggatataccgcaacactgactcggaccaccccctccttctttcccaaagatatcttgactctgagacttgacgtaatgatggagacagaaaacaggctccactttaccattaaggaccctgccaatcgccgatacgaggtgcctctggaaacaccacacgtgcacagtagagctccatcacctctgtattctgtcgagttctccgaagagccgtttggcgttatcgtcaggaggcagctcgacgggcgagtgcttctgaacacgactgtggccccgttgttctttgcggatcagtttctgcaactgtcaacaagtctcccttctcagtacattaccgggcttgcagagcatctgtccccactcatgctgagtacttcatggaacaaaatcacactgtggaatagagaccttgctcctactccaggagccaacttgtatggttctcaccctttctacttggccctggaagatggcggatcagcgcatggcgtattcctcctgaattccaacgcaatggacgttgttcttcagccatctcctgctttgagttggagatctacaggcgggatactggacgtctacatctttctgggtccagagcctaaatccgtagtgcagcagtatcttgatgtcgtcggatacccgtttatgccaccatattggggcctggggttccacttgtgccgctggggatattcatccaccgccattacacgacaagttgttgagaatatgaccagggcacattttcctctggatgtacagtggaacgacctggactacatggatagtcgccgcgacttcaccttcaataaggatgggttcagagactttcctgctatggtccaagaacttcaccagggaggcaggaggtacatgatgatcgtagatccgggaatttcttcttctggcccagccggttcatacagaccgtatgacgaaggactgcgacgaggcgtctttatcacgaacgagactggtcagcctttgataggcaaggtttggccagggtccaccgctttcccggatttcacaaatcctgaggcactggcctggtgggaagatatggtcgccgagtttcacgaccaggtcccatttgacgggatgtggatcgacatgaacgagccatccaacttcattagaggaagtgtggatggctgtccgaataatgagctggaaaaccctccttacgtaccaggcgttgttggtgggactcttcaagctgcgacgatttgcgcatcctcccatcagttcctgtcaacccactataacttgcacaatctgtacgggacaacagaggctatcgccagtcatagggccctggtaaaagctagaggaacacgccctttcgttatctctcgctcaacttttgcaggccacggtaggtatgccggacattggaccggcgacgtctggagttcttgggaacagctggcttcctccgttccagagatattgcagtttaacctgttgggagtcccacttgtaggtgcagatgtttgtggcttcctggggaacacctcagaagaattgtgcgtaagatggactcaactgggcgccttctacccttttatgcgcaatcacaactcactgacatctttgcctcaagaaccgtactcatttagtgagccagcacagcaggccatgaggaaggctcttggcctgagatatgcacttctgccgcatctgtacacccttttccaccaggctcatgtcgagggagagactgttgcacgacctctgttcttggagttcccaaaagactcttccacgtggacagtcgatcaccagatgctgtggggcgaggctctgctgattacacctgtattgcaacctggtaaggccgaagttaccgggtactttccattggggacctggtatgatctgcaaacagtcccggttgaagctcttggaagtcttccacctccacctgctgcaccaagggagcctgcgatccactctgaaggacagtgggtaactttgcctgcaccgctggacaccatcaatgtccatctgcgcgaaggctacatcataccacttcaaggtcctggactgaccactacagagtctagaaaacaaccaatggctcttgctgttgcactgactaaaagcggcgaagcaaggggtgagctgttctgggacgacggagagtcactggaggtactcgaacgaggcgcgtatacgcaggtcatttttgaggctcgcaataatacgatcgttaacgagctggtccacgtcacttcagaaggtgcaggccttcagttgggcaaggtaactgtcctgggagttgctacagcaccgcagcaggtcttgtccaacggacggcccgtaagcaactttacctatagtcctgataccaaagttctggacatctgcgttgctctgctgatgggtgagcagttcctggtatcatggtgc

SEQ ID NO: 310 - protein, 944 aa, synthetic construct
  REGION 1..944: note = Variant of the Homo Sapiens Lysosomal alpha-glucosidase
MEWSWVFLFFLSVTTGVHSGHILWHDFSTVPRELSGSSQVLEETHPAHQVGASRPGPRDAQLHPGRPRAVPTQCDVPENSRFDCAPEKAITQEQCEARGCCYIPAKQGLQGAQMGQPWCFFPPSYPSYKLENLSQSEMGYTATLTRTTPSFFPKDILTLRLDVMMETENRLHFTIKDPANRRYEVPLETPHVHSRAPSPLYSVEFSEEPFGVIVRRQLDGRVLLNTTVAPLFFADQFLQLSTSLPSQYITGLAEHLSPLMLSTSWNKITLWNRDLAPTPGANLYGSHPFYLALEDGGSAHGVFLLNSNAMDVVLQPSPALSWRSTGGILDVYIFLGPEPKSVVQQYLDVVGYPFMPPYWGLGFHLCRWGYSSTAITRQVVENMTRAHFPLDVQWNDLDYMDSRRDFTFNKDGFRDFPAMVQELHQGGRRYMMIVDPGISSSGPAGSYRPYDEGLRRGVFITNETGQPLIGKVWPGSTAFPDFTNPEALAWWEDMVAEFHDQVPFDGMWIDMNEPSNFIRGSVDGCPNNELENPPYVPGVVGGTLQAATICASSHQFLSTHYNLHNLYGTTEAIASHRALVKARGTRPFVISRSTFAGHGRYAGHWTGDVWSSWEQLASSVPEILQFNLLGVPLVGADVCGFLGNTSEELCVRWTQLGAFYPFMRNHNSLTSLPQEPYSFSEPAQQAMRKALGLRYALLPHLYTLFHQAHVEGETVARPLFLEFPKDSSTWTVDHQMLWGEALLITPVLQPGKAEVTGYFPLGTWYDLQTVPVEALGSLPPPPAAPREPAIHSEGQWVTLPAPLDTINVHLREGYIIPLQGPGLTTTESRKQPMALAVALTKSGEARGELFWDDGESLEVLERGAYTQVIFEARNNTIVNELVHVTSEGAGLQLGKVTVLGVATAPQQVLSNGRPVSNFTYSPDTKVLDICVALLMGEQFLVSWC

SEQ ID NO: 311 - DNA, 2832 bp, synthetic construct
  misc_feature 1..2832: note = Variant of the Homo Sapiens Lysosomal alpha-glucosidase
  source 1..2832: mol_type = other DNA
atggaatggagctgggtctttctcttcttcctgtcagtaacgactggtgtccactccggacacattctgtggcatgatttttctaccgtgcctagagagctttccggttcaagtcaagtcctcgaagaaacacatccagcccatcaggttggcgcatctaggccgggccctcgggacgctcaactccacccagggagacctagggccgttcccactcagtgcgacgtgccagagaactcacgcttcgattgtgcacctgagaaggctatcacgcaagagcagtgcgaggcccgcggatgttgttacataccggctaaacaggggctgcagggtgcgcagatgggccaaccttggtgcttcttcccaccatcctatccgagttacaagctggagaatctctcccagtctgaaatgggatataccgcaacactgactcggaccaccccctccttctttcccaaagatatcttgactctgagacttgacgtaatgatggagacagaaaacaggctccactttaccattaaggaccctgccaatcgccgatacgaggtgcctctggaaacaccacacgtgcacagtagagctccatcacctctgtattctgtcgagttctccgaagagccgtttggcgttatcgtcaggaggcagctcgacgggcgagtgcttctgaacacgactgtggccccgttgttctttgcggatcagtttctgcaactgtcaacaagtctcccttctcagtacattaccgggcttgcagagcatctgtccccactcatgctgagtacttcatggaacaaaatcacactgtggaatagagaccttgctcctactccaggagccaacttgtatggttctcaccctttctacttggccctggaagatggcggatcagcgcatggcgtattcctcctgaattccaacgcaatggacgttgttcttcagccatctcctgctttgagttggagatctacaggcgggatactggacgtctacatctttctgggtccagagcctaaatccgtagtgcagcagtatcttgatgtcgtcggatacccgtttatgccaccatattggggcctggggttccacttgtgccgctggggatattcatccaccgccattacacgacaagttgttgagaatatgaccagggcacattttcctctggatgtacagtggaacgacctggactacatggatagtcgccgcgacttcaccttcaataaggatgggttcagagactttcctgctatggtccaagaacttcaccagggaggcaggaggtacatgatgatcgtagatccgggaatttcttcttctggcccagccggttcatacagaccgtatgacgaaggactgcgacgaggcgtctttatcacgaacgagactggtcagcctttgataggcaaggtttggccagggtccaccgctttcccggatttcacaaatcctgaggcactggcctggtgggaagatatggtcgccgagtttcacgaccaggtcccatttgacgggatgtggatcgacatgaacgagccatccaacttcattagaggaagtgtggatggctgtccgaataatgagctggaaaaccctccttacgtaccaggcgttgttggtgggactcttcaagctgcgacgatttgcgcatcctcccatcagttcctgtcaacccactataacttgcacaatctgtacgggacaacagaggctatcgccagtcatagggccctggtaaaagctagaggaacacgccctttcgttatctctcgctcaacttttgcaggccacggtaggtatgccggacattggaccggcgacgtctggagttcttgggaacagctggcttcctccgttccagagatattgcagtttaacctgttgggagtcccacttgtaggtgcagatgtttgtggcttcctggggaacacctcagaagaattgtgcgtaagatggactcaactgggcgccttctacccttttatgcgcaatcacaactcactgacatctttgcctcaagaaccgtactcatttagtgagccagcacagcaggccatgaggaaggctcttggcctgagatatgcacttctgccgcatctgtacacccttttccaccaggctcatgtccatggagagactgttgcacgacctctgttcttggagttcccaaaagactcttccacgtggacagtcgatcaccagatgctgtggggcgaggctctgctgattacacctgtattgcaacctggtaaggccgaagttaccgggtactttccattggggacctggtatgatctgcaaacagtcccggttgaagctcttggaagtcttccacctccacctgctgcaccaagggagcctgcgatccactctgaaggacagtgggtaactttgcctgcaccgctggacaccatcaatgtccatctgcgcgaaggctacatcataccacttcaaggtcctggactgaccactacagagtctagaaaacaaccaatggctcttgctgttgcactgactaaatttggcgaagcaaggggtgagctgttctgggacgacggagagtcactggaggtactcgaacgaggcgcgtatacgcaggtcatttttgaggctcgcaataatacgatcgttaacgagctggtccacgtcacttcagaaggtgcaggccttcagttgggcaaggtaactgtcctgggagttgctacagcaccgcagcaggtcttgtccaacggacggcccgtaagcaactttacctatagtcctgataccaaagttctggacatctgcgttgctctgctgatgggtgagcagttcctggtatcatggtgc

SEQ ID NO: 312 - protein, 944 aa, synthetic construct
  REGION 1..944: note = Variant of the Homo Sapiens Lysosomal alpha-glucosidase
MEWSWVFLFFLSVTTGVHSGHILWHDFSTVPRELSGSSQVLEETHPAHQVGASRPGPRDAQLHPGRPRAVPTQCDVPENSRFDCAPEKAITQEQCEARGCCYIPAKQGLQGAQMGQPWCFFPPSYPSYKLENLSQSEMGYTATLTRTTPSFFPKDILTLRLDVMMETENRLHFTIKDPANRRYEVPLETPHVHSRAPSPLYSVEFSEEPFGVIVRRQLDGRVLLNTTVAPLFFADQFLQLSTSLPSQYITGLAEHLSPLMLSTSWNKITLWNRDLAPTPGANLYGSHPFYLALEDGGSAHGVFLLNSNAMDVVLQPSPALSWRSTGGILDVYIFLGPEPKSVVQQYLDVVGYPFMPPYWGLGFHLCRWGYSSTAITRQVVENMTRAHFPLDVQWNDLDYMDSRRDFTFNKDGFRDFPAMVQELHQGGRRYMMIVDPGISSSGPAGSYRPYDEGLRRGVFITNETGQPLIGKVWPGSTAFPDFTNPEALAWWEDMVAEFHDQVPFDGMWIDMNEPSNFIRGSVDGCPNNELENPPYVPGVVGGTLQAATICASSHQFLSTHYNLHNLYGTTEAIASHRALVKARGTRPFVISRSTFAGHGRYAGHWTGDVWSSWEQLASSVPEILQFNLLGVPLVGADVCGFLGNTSEELCVRWTQLGAFYPFMRNHNSLTSLPQEPYSFSEPAQQAMRKALGLRYALLPHLYTLFHQAHVHGETVARPLFLEFPKDSSTWTVDHQMLWGEALLITPVLQPGKAEVTGYFPLGTWYDLQTVPVEALGSLPPPPAAPREPAIHSEGQWVTLPAPLDTINVHLREGYIIPLQGPGLTTTESRKQPMALAVALTKFGEARGELFWDDGESLEVLERGAYTQVIFEARNNTIVNELVHVTSEGAGLQLGKVTVLGVATAPQQVLSNGRPVSNFTYSPDTKVLDICVALLMGEQFLVSWC

SEQ ID NO: 313 - DNA, 2832 bp, synthetic construct
  misc_feature 1..2832: note = Variant of the Homo Sapiens Lysosomal alpha-glucosidase
  source 1..2832: mol_type = other DNA
atggaatggagctgggtctttctcttcttcctgtcagtaacgactggtgtccactccggacacattctgtggcatgatttttctaccgtgcctagagagctttccggttcaagtcaagtcctcgaagaaacacatccagcccatcagaatggcgcatctaggccgggccctcgggacgctcaactccacccagggagacctagggccgttcccactcagtgcgacgtgccagagaactcacgcttcgattgtgcacctgagaaggctatcacgcaagagcagtgcgaggcccgcggatgttgttacataccggctaaacaggggctgcagggtgcgcagatgggccaaccttggtgcttcttcccaccatcctatccgagttacaagctggagaatctctcccagtctgaaatgggatataccgcaacactgactcggaccaccccctccttctttcccaaagatatcttgactctgagacttgacgtaatgatggagacagaaaacaggctccactttaccattaaggaccctgccaatcgccgatacgaggtgcctctggaaacaccacacgtgcacagtagagctccatcacctctgtattctgtcgagttctccgaagagccgtttggcgttatcgtcaggaggcagctcgacgggcgagtgcttctgaacacgactgtggccccgttgttctttgcggatcagtttctgcaactgtcaacaagtctcccttctcagtacattaccgggcttgcagagcatctgtccccactcatgctgagtacttcatggaacaaaatcacactgtggaatagagaccttgctcctactccaggagccaacttgtatggttctcaccctttctacttggccctggaagatggcggatcagcgcatggcgtattcctcctgaattccaacgcaatggacgttgttcttcagccatctcctgctttgagttggagatctacaggcgggatactggacgtctacatctttctgggtccagagcctaaatccgtagtgcagcagtatcttgatgtcgtcggatacccgtttatgccaccatattggggcctggggttccacttgtgccgctggggatattcatccaccgccattacacgacaagttgttgagaatatgaccagggcacattttcctctggatgtacagtggaacgacctggactacatggatagtcgccgcgacttcaccttcaataaggatgggttcagagactttcctgctatggtccaagaacttcaccagggaggcaggaggtacatgatgatcgtagatccgggaatttcttcttctggcccagccggttcatacagaccgtatgacgaaggactgcgacgaggcgtctttatcacgaacgagactggtcagcctttgataggcaaggtttggccagggtccaccgctttcccggatttcacaaatcctgaggcactggcctggtgggaagatatggtcgccgagtttcacgaccaggtcccatttgacgggatgtggatcgacatgaacgagccatccaacttcattagaggaagtgtggatggctgtccgaataatgagctggaaaaccctccttacgtaccaggcgttgttggtgggactcttcaagctgcgacgatttgcgcatcctcccatcagttcctgtcaacccactataacttgcacaatctgtacgggacaacagaggctatcgccagtcatagggccctggtaaaagctagaggaacacgccctttcgttatctctcgctcaacttttgcaggccacggtaggtatgccggacattggaccggcgacgtctggagttcttgggaacagctggcttcctccgttccagagatattgcagtttaacctgttgggagtcccacttgtaggtgcagatgtttgtggcttcctggggaacacctcagaagaattgtgcgtaagatggactcaactgggcgccttctacccttttatgcgcaatcacaactcactgacatctttgcctcaagaaccgtactcatttagtgagccagcacagcaggccatgaggaaggctcttggcctgagatatgcacttctgccgcatctgtacacccttttccaccaggctcatgtccatggagagactgttgcacgacctctgttcttggagttcccaaaagactcttccacgtggacagtcgatcaccagatgctgtggggcgaggctctgctgattacacctgtattgcaacctggtaaggccgaagttaccgggtactttccattggggacctggtatgatctgcaaacagtcccggttgaagctcttggaagtcttccacctccacctgctgcaccaagggagcctgcgatccactctgaaggacagtgggtaactttgcctgcaccgctggacaccatcaatgtccatctgcgcgaaggctacatcataccacttcaaggtcctggactgaccactacagagtctagaaaacaaccaatggctcttgctgttgcactgactaaaagcggcgaagcaaggggtgagctgttctgggacgacggagagtcactggaggtactcgaacgaggcgcgtatacgcaggtcatttttgaggctcgcaataatacgatcgttaacgagctggtccacgtcacttcagaaggtgcaggccttcagttgggcaaggtaactgtcctgggagttgctacagcaccgcagcaggtcttgtccaacggacggcccgtaagcaactttacctatagtcctgataccaaagttctggacatctgcgttgctctgctgatgggtgagcagttcctggtatcatggtgc

SEQ ID NO: 314 - protein, 944 aa, synthetic construct
  REGION 1..944: note = Variant of the Homo Sapiens Lysosomal alpha-glucosidase
MEWSWVFLFFLSVTTGVHSGHILWHDFSTVPRELSGSSQVLEETHPAHQNGASRPGPRDAQLHPGRPRAVPTQCDVPENSRFDCAPEKAITQEQCEARGCCYIPAKQGLQGAQMGQPWCFFPPSYPSYKLENLSQSEMGYTATLTRTTPSFFPKDILTLRLDVMMETENRLHFTIKDPANRRYEVPLETPHVHSRAPSPLYSVEFSEEPFGVIVRRQLDGRVLLNTTVAPLFFADQFLQLSTSLPSQYITGLAEHLSPLMLSTSWNKITLWNRDLAPTPGANLYGSHPFYLALEDGGSAHGVFLLNSNAMDVVLQPSPALSWRSTGGILDVYIFLGPEPKSVVQQYLDVVGYPFMPPYWGLGFHLCRWGYSSTAITRQVVENMTRAHFPLDVQWNDLDYMDSRRDFTFNKDGFRDFPAMVQELHQGGRRYMMIVDPGISSSGPAGSYRPYDEGLRRGVFITNETGQPLIGKVWPGSTAFPDFTNPEALAWWEDMVAEFHDQVPFDGMWIDMNEPSNFIRGSVDGCPNNELENPPYVPGVVGGTLQAATICASSHQFLSTHYNLHNLYGTTEAIASHRALVKARGTRPFVISRSTFAGHGRYAGHWTGDVWSSWEQLASSVPEILQFNLLGVPLVGADVCGFLGNTSEELCVRWTQLGAFYPFMRNHNSLTSLPQEPYSFSEPAQQAMRKALGLRYALLPHLYTLFHQAHVHGETVARPLFLEFPKDSSTWTVDHQMLWGEALLITPVLQPGKAEVTGYFPLGTWYDLQTVPVEALGSLPPPPAAPREPAIHSEGQWVTLPAPLDTINVHLREGYIIPLQGPGLTTTESRKQPMALAVALTKSGEARGELFWDDGESLEVLERGAYTQVIFEARNNTIVNELVHVTSEGAGLQLGKVTVLGVATAPQQVLSNGRPVSNFTYSPDTKVLDICVALLMGEQFLVSWC

SEQ ID NO: 315 - DNA, 2832 bp, synthetic construct
  misc_feature 1..2832: note = Variant of the Homo Sapiens Lysosomal alpha-glucosidase
  source 1..2832: mol_type = other DNA
atggaatggagctgggtctttctcttcttcctgtcagtaacgactggtgtccactccggacacattctgtggcatgatttttctaccgtgcctagagagctttccggttcaagtcaagtcctcgaagaaacacatccagcccatcaggttggcgcatctaggccgggccctcgggacgctcaactccacccagggagacctagggccgttcccactcagtgcgacgtgccagagaactcacgcttcgattgtgcacctgagaaggctatcacgcaagagcagtgcgaggcccgcggatgttgttacataccggctaaacaggggctgcagggtgcgcagatgggccaaccttggtgcttcttcccaccatcctatccgagttacaagctggagaatctctccgattctgaaatgggatataccgcaacactgactcggaccaccccctccttctttcccaaagatatcttgactctgagacttgacgtaatgatggagacagaaaacaggctccactttaccattaaggaccctgccaatcgccgatacgaggtgcctctggaaacaccacacgtgcacagtagagctccatcacctctgtattctgtcgagttctccgaagagccgtttggcgttatcgtcaggaggcagctcgacgggcgagtgcttctgaacacgactgtggccccgttgttctttgcggatcagtttctgcaactgtcaacaagtctcccttctcagtacattaccgggcttgcagagcatctgtccccactcatgctgagtacttcatggaacaaaatcacactgtggaatagagaccttgctcctactccaggagccaacttgtatggttctcaccctttctacttggccctggaagatggcggatcagcgcatggcgtattcctcctgaattccaacgcaatggacgttgttcttcagccatctcctgctttgagttggagatctacaggcgggatactggacgtctacatctttctgggtccagagcctaaatccgtagtgcagcagtatcttgatgtcgtcggatacccgtttatgccaccatattggggcctggggttccacttgtgccgctggggatattcatccaccgccattacacgacaagttgttgagaatatgaccagggcacattttcctctggatgtacagtggaacgacctggactacatggatagtcgccgcgacttcaccttcaataaggatgggttcagagactttcctgctatggtccaagaacttcaccagggaggcaggaggtacatgatgatcgtagatccgggaatttcttcttctggcccagccggttcatacagaccgtatgacgaaggactgcgacgaggcgtctttatcacgaacgagactggtcagcctttgataggcaaggtttggccagggtccaccgctttcccggatttcacaaatcctgaggcactggcctggtgggaagatatggtcgccgagtttcacgaccaggtcccatttgacgggatgtggatcgacatgaacgagccatccaacttcattagaggaagtgtggatggctgtccgaataatgagctggaaaaccctccttacgtaccaggcgttgttggtgggactcttcaagctgcgacgatttgcgcatcctcccatcagttcctgtcaacccactataacttgcacaatctgtacgggacaacagaggctatcgccagtcatagggccctggtaaaagctagaggaacacgccctttcgttatctctcgctcaacttttgcaggccacggtaggtatgccggacattggaccggcgacgtctggagttcttgggaacagctggcttcctccgttccagagatattgcagtttaacctgttgggagtcccacttgtaggtgcagatgtttgtggcttcctggggaacacctcagaagaattgtgcgtaagatggactcaactgggcgccttctacccttttatgcgcaatcacaactcactgacatctttgcctcaagaaccgtactcatttagtgagccagcacagcaggccatgaggaaggctcttggcctgagatatgcacttctgccgcatctgtacacccttttccaccaggctcatgtccatggagagactgttgcacgacctctgttcttggagttcccaaaagactcttccacgtggacagtcgatcaccagatgctgtggggcgaggctctgctgattacacctgtattgcaacctggtaaggccgaagttaccgggtactttccattggggacctggtatgatctgcaaacagtcccggttgaagctcttggaagtcttccacctccacctgctgcaccaagggagcctgcgatccactctgaaggacagtgggtaactttgcctgcaccgctggacaccatcaatgtccatctgcgcgaaggctacatcataccacttcaaggtcctggactgaccactacagagtctagaaaacaaccaatggctcttgctgttgcactgactaaaagcggcgaagcaaggggtgagctgttctgggacgacggagagtcactggaggtactcgaacgaggcgcgtatacgcaggtcatttttgaggctcgcaataatacgatcgttaacgagctggtccacgtcacttcagaaggtgcaggccttcagttgggcaaggtaactgtcctgggagttgctacagcaccgcagcaggtcttgtccaacggacggcccgtaagcaactttacctatagtcctgataccaaagttctggacatctgcgttgctctgctgatgggtgagcagttcctggtatcatggtgc

SEQ ID NO: 316 - protein, 944 aa, synthetic construct
  REGION 1..944: note = Variant of the Homo Sapiens Lysosomal alpha-glucosidase
MEWSWVFLFFLSVTTGVHSGHILWHDFSTVPRELSGSSQVLEETHPAHQVGASRPGPRDAQLHPGRPRAVPTQCDVPENSRFDCAPEKAITQEQCEARGCCYIPAKQGLQGAQMGQPWCFFPPSYPSYKLENLSDSEMGYTATLTRTTPSFFPKDILTLRLDVMMETENRLHFTIKDPANRRYEVPLETPHVHSRAPSPLYSVEFSEEPFGVIVRRQLDGRVLLNTTVAPLFFADQFLQLSTSLPSQYITGLAEHLSPLMLSTSWNKITLWNRDLAPTPGANLYGSHPFYLALEDGGSAHGVFLLNSNAMDVVLQPSPALSWRSTGGILDVYIFLGPEPKSVVQQYLDVVGYPFMPPYWGLGFHLCRWGYSSTAITRQVVENMTRAHFPLDVQWNDLDYMDSRRDFTFNKDGFRDFPAMVQELHQGGRRYMMIVDPGISSSGPAGSYRPYDEGLRRGVFITNETGQPLIGKVWPGSTAFPDFTNPEALAWWEDMVAEFHDQVPFDGMWIDMNEPSNFIRGSVDGCPNNELENPPYVPGVVGGTLQAATICASSHQFLSTHYNLHNLYGTTEAIASHRALVKARGTRPFVISRSTFAGHGRYAGHWTGDVWSSWEQLASSVPEILQFNLLGVPLVGADVCGFLGNTSEELCVRWTQLGAFYPFMRNHNSLTSLPQEPYSFSEPAQQAMRKALGLRYALLPHLYTLFHQAHVHGETVARPLFLEFPKDSSTWTVDHQMLWGEALLITPVLQPGKAEVTGYFPLGTWYDLQTVPVEALGSLPPPPAAPREPAIHSEGQWVTLPAPLDTINVHLREGYIIPLQGPGLTTTESRKQPMALAVALTKSGEARGELFWDDGESLEVLERGAYTQVIFEARNNTIVNELVHVTSEGAGLQLGKVTVLGVATAPQQVLSNGRPVSNFTYSPDTKVLDICVALLMGEQFLVSWC

SEQ ID NO: 317 - DNA, 2832 bp, synthetic construct
  misc_feature 1..2832: note = Variant of the Homo Sapiens Lysosomal alpha-glucosidase
  source 1..2832: mol_type = other DNA
atggaatggagctgggtctttctcttcttcctgtcagtaacgactggtgtccactccggacacattctgtggcatgatttttctaccgtgcctagagagctttccggttcaagtcaagtcctcgaagaaacacatccagcccatcaggttggcgcatctaggccgggccctcgggacgctcaactccacccagggagacctagggccgttcccactcagtgcgacgtgccagagaactcacgcttcgattgtgcacctgagaaggctatcacgcaagagcagtgcgaggcccgcggatgttgttacataccggctaaacaggggctgcagggtgcgcagatgggccaaccttggtgcttcttcccaccatcctatccgagttacaagctggagaatctctcccagtctgaaatgggatataccgcaacactgactcggaccaccccctccttctttcccaaagatatcttgactctgagacttgacgtaatgatggagacagaaaacaggctccactttaccattaaggaccctgccaatcgccgatacgaggtgcctctggaaacaccacacgtgcacagtagagctccatcacctctgtattctgtcgagttctccgaagagccgtttggcgttatcgtcaggaggcagctcgacgggcgagtgcttctgaacacgactgtggccccgttgttctttgcggatcagtttctgcaactgtcaacaagtctcccttctcagtacattaccgggcttgcagagcatctgtccccactcatgctgagtacttcatggaacaggatcacactgtggaatagagaccttgctcctactccaggagccaacttgtatggttctcaccctttctacttggccctggaagatggcggatcagcgcatggcgtattcctcctgaattccaacgcaatggacgttgttcttcagccatctcctgctttgagttggagatctacaggcgggatactggacgtctacatctttctgggtccagagcctaaatccgtagtgcagcagtatcttgatgtcgtcggatacccgtttatgccaccatattggggcctggggttccacttgtgccgctggggatattcatccaccgccattacacgacaagttgttgagaatatgaccagggcacattttcctctggatgtacagtggaacgacctggactacatggatagtcgccgcgacttcaccttcaataaggatgggttcagagactttcctgctatggtccaagaacttcaccagggaggcaggaggtacatgatgatcgtagatccgggaatttcttcttctggcccagccggttcatacagaccgtatgacgaaggactgcgacgaggcgtctttatcacgaacgagactggtcagcctttgataggcaaggtttggccagggtccaccgctttcccggatttcacaaatcctgaggcactggcctggtgggaagatatggtcgccgagtttcacgaccaggtcccatttgacgggatgtggatcgacatgaacgagccatccaacttcattagaggaagtgtggatggctgtccgaataatgagctggaaaaccctccttacgtaccaggcgttgttggtgggactcttcaagctgcgacgatttgcgcatcctcccatcagttcctgtcaacccactataacttgcacaatctgtacgggacaacagaggctatcgccagtcatagggccctggtaaaagctagaggaacacgccctttcgttatctctcgctcaacttttgcaggccacggtaggtatgccggacattggaccggcgacgtctggagttcttgggaacagctggcttcctccgttccagagatattgcagtttaacctgttgggagtcccacttgtaggtgcagatgtttgtggcttcctggggaacacctcagaagaattgtgcgtaagatggactcaactgggcgccttctacccttttatgcgcaatcacaactcactgacatctttgcctcaagaaccgtactcatttagtgagccagcacagcaggccatgaggaaggctcttggcctgagatatgcacttctgccgcatctgtacacccttttccaccaggctcatgtccatggagagactgttgcacgacctctgttcttggagttcccaaaagactcttccacgtggacagtcgatcaccagatgctgtggggcgaggctctgctgattacacctgtattgcaacctggtaaggccgaagttaccgggtactttccattggggacctggtatgatctgcaaacagtcccggttgaagctcttggaagtcttccacctccacctgctgcaccaagggagcctgcgatccactctgaaggacagtgggtaactttgcctgcaccgctggacaccatcaatgtccatctgcgcgaaggctacatcataccacttcaaggtcctggactgaccactacagagtctagaaaacaaccaatggctcttgctgttgcactgactaaaagcggcgaagcaaggggtgagctgttctgggacgacggagagtcactggaggtactcgaacgaggcgcgtatacgcaggtcatttttgaggctcgcaataatacgatcgttaacgagctggtccacgtcacttcagaaggtgcaggccttcagttgggcaaggtaactgtcctgggagttgctacagcaccgcagcaggtcttgtccaacggacggcccgtaagcaactttacctatagtcctgataccaaagttctggacatctgcgttgctctgctgatgggtgagcagttcctggtatcatggtgc

SEQ ID NO: 318 - protein, 944 aa, synthetic construct
  REGION 1..944: note = Variant of the Homo Sapiens Lysosomal alpha-glucosidase
MEWSWVFLFFLSVTTGVHSGHILWHDFSTVPRELSGSSQVLEETHPAHQVGASRPGPRDAQLHPGRPRAVPTQCDVPENSRFDCAPEKAITQEQCEARGCCYIPAKQGLQGAQMGQPWCFFPPSYPSYKLENLSQSEMGYTATLTRTTPSFFPKDILTLRLDVMMETENRLHFTIKDPANRRYEVPLETPHVHSRAPSPLYSVEFSEEPFGVIVRRQLDGRVLLNTTVAPLFFADQFLQLSTSLPSQYITGLAEHLSPLMLSTSWNRITLWNRDLAPTPGANLYGSHPFYLALEDGGSAHGVFLLNSNAMDVVLQPSPALSWRSTGGILDVYIFLGPEPKSVVQQYLDVVGYPFMPPYWGLGFHLCRWGYSSTAITRQVVENMTRAHFPLDVQWNDLDYMDSRRDFTFNKDGFRDFPAMVQELHQGGRRYMMIVDPGISSSGPAGSYRPYDEGLRRGVFITNETGQPLIGKVWPGSTAFPDFTNPEALAWWEDMVAEFHDQVPFDGMWIDMNEPSNFIRGSVDGCPNNELENPPYVPGVVGGTLQAATICASSHQFLSTHYNLHNLYGTTEAIASHRALVKARGTRPFVISRSTFAGHGRYAGHWTGDVWSSWEQLASSVPEILQFNLLGVPLVGADVCGFLGNTSEELCVRWTQLGAFYPFMRNHNSLTSLPQEPYSFSEPAQQAMRKALGLRYALLPHLYTLFHQAHVHGETVARPLFLEFPKDSSTWTVDHQMLWGEALLITPVLQPGKAEVTGYFPLGTWYDLQTVPVEALGSLPPPPAAPREPAIHSEGQWVTLPAPLDTINVHLREGYIIPLQGPGLTTTESRKQPMALAVALTKSGEARGELFWDDGESLEVLERGAYTQVIFEARNNTIVNELVHVTSEGAGLQLGKVTVLGVATAPQQVLSNGRPVSNFTYSPDTKVLDICVALLMGEQFLVSWC

SEQ ID NO: 319 - DNA, 2832 bp, synthetic construct
  misc_feature 1..2832: note = Variant of the Homo Sapiens Lysosomal alpha-glucosidase
  source 1..2832: mol_type = other DNA
atggaatggagctgggtctttctcttcttcctgtcagtaacgactggtgtccactccggacacattctgtggcatgatttttctaccgtgcctagagagctttccggttcaagtcaagtcctcgaagaaacacatccagcccatcaggttggcgcatctaggccgggccctcgggacgctcaactccacccagggagacctagggccgttcccactcagtgcgacgtgccaagtaactcacgcttcgattgtgcacctgagaaggctatcacgcaagagcagtgcgaggcccgcggatgttgttacataccggctaaacaggggctgcagggtgcgcagatgggccaaccttggtgcttcttcccaccatcctatccgagttacaagctggagaatctctcccagtctgaaatgggatataccgcaacactgactcggaccaccccctccttctttcccaaagatatcttgactctgagacttgacgtaatgatggagacagaaaacaggctccactttaccattaaggaccctgccaatcgccgatacgaggtgcctctggaaacaccacacgtgcacagtagagctccatcacctctgtattctgtcgagttctccgaagagccgtttggcgttatcgtcaggaggcagctcgacgggcgagtgcttctgaacacgactgtggccccgttgttctttgcggatcagtttctgcaactgtcaacaagtctcccttctcagtacattaccgggcttgcagagcatctgtccccactcatgctgagtacttcatggaacaaaatcacactgtggaatagagaccttgctcctactccaggagccaacttgtatggttctcaccctttctacttggccctggaagatggcggatcagcgcatggcgtattcctcctgaattccaacgcaatggacgttgttcttcagccatctcctgctttgagttggagatctacaggcgggatactggacgtctacatctttctgggtccagagcctaaatccgtagtgcagcagtatcttgatgtcgtcggatacccgtttatgccaccatattggggcctggggttccacttgtgccgctggggatattcatccaccgccattacacgacaagttgttgagaatatgaccagggcacattttcctctggatgtacagtggaacgacctggactacatggatagtcgccgcgacttcaccttcaataaggatgggttcagagactttcctgctatggtccaagaacttcaccagggaggcaggaggtacatgatgatcgtagatccgggaatttcttcttctggcccagccggttcatacagaccgtatgacgaaggactgcgacgaggcgtctttatcacgaacgagactggtcagcctttgataggcaaggtttggccagggtccaccgctttcccggatttcacaaatcctgaggcactggcctggtgggaagatatggtcgccgagtttcacgaccaggtcccatttgacgggatgtggatcgacatgaacgagccatccaacttcattagaggaagtgtggatggctgtccgaataatgagctggaaaaccctccttacgtaccaggcgttgttggtgggactcttcaagctgcgacgatttgcgcatcctcccatcagttcctgtcaacccactataacttgcacaatctgtacgggacaacagaggctatcgccagtcatagggccctggtaaaagctagaggaacacgccctttcgttatctctcgctcaacttttgcaggccacggtaggtatgccggacattggaccggcgacgtctggagttcttgggaacagctggcttcctccgttccagagatattgcagtttaacctgttgggagtcccacttgtaggtgcagatgtttgtggcttcctggggaacacctcagaagaattgtgcgtaagatggactcaactgggcgccttctacccttttatgcgcaatcacaactcactgacatctttgcctcaagaaccgtactcatttagtgagccagcacagcaggccatgaggaaggctcttggcctgagatatgcacttctgccgcatctgtacacccttttccaccaggctcatgtccatggagagactgttgcacgacctctgttcttggagttcccaaaagactcttccacgtggacagtcgatcaccagatgctgtggggcgaggctctgctgattacacctgtattgcaacctggtaaggccgaagttaccgggtactttccattggggacctggtatgatctgcaaacagtcccggttgaagctcttggaagtcttccacctccacctgctgcaccaagggagcctgcgatccactctgaaggacagtgggtaactttgcctgcaccgctggacaccatcaatgtccatctgcgcgaaggctacatcataccacttcaaggtcctggactgaccactacagagtctagaaaacaaccaatggctcttgctgttgcactgactaaaagcggcgaagcaaggggtgagctgttctgggacgacggagagtcactggaggtactcgaacgaggcgcgtatacgcaggtcatttttgaggctcgcaataatacgatcgttaacgagctggtccacgtcacttcagaaggtgcaggccttcagttgggcaaggtaactgtcctgggagttgctacagcaccgcagcaggtcttgtccaacggacggcccgtaagcaactttacctatagtcctgataccaaagttctggacatctgcgttgctctgctgatgggtgagcagttcctggtatcatggtgc

SEQ ID NO: 320 - protein, 944 aa, synthetic construct
  REGION 1..944: note = Variant of the Homo Sapiens Lysosomal alpha-glucosidase
MEWSWVFLFFLSVTTGVHSGHILWHDFSTVPRELSGSSQVLEETHPAHQVGASRPGPRDAQLHPGRPRAVPTQCDVPSNSRFDCAPEKAITQEQCEARGCCYIPAKQGLQGAQMGQPWCFFPPSYPSYKLENLSQSEMGYTATLTRTTPSFFPKDILTLRLDVMMETENRLHFTIKDPANRRYEVPLETPHVHSRAPSPLYSVEFSEEPFGVIVRRQLDGRVLLNTTVAPLFFADQFLQLSTSLPSQYITGLAEHLSPLMLSTSWNKITLWNRDLAPTPGANLYGSHPFYLALEDGGSAHGVFLLNSNAMDVVLQPSPALSWRSTGGILDVYIFLGPEPKSVVQQYLDVVGYPFMPPYWGLGFHLCRWGYSSTAITRQVVENMTRAHFPLDVQWNDLDYMDSRRDFTFNKDGFRDFPAMVQELHQGGRRYMMIVDPGISSSGPAGSYRPYDEGLRRGVFITNETGQPLIGKVWPGSTAFPDFTNPEALAWWEDMVAEFHDQVPFDGMWIDMNEPSNFIRGSVDGCPNNELENPPYVPGVVGGTLQAATICASSHQFLSTHYNLHNLYGTTEAIASHRALVKARGTRPFVISRSTFAGHGRYAGHWTGDVWSSWEQLASSVPEILQFNLLGVPLVGADVCGFLGNTSEELCVRWTQLGAFYPFMRNHNSLTSLPQEPYSFSEPAQQAMRKALGLRYALLPHLYTLFHQAHVHGETVARPLFLEFPKDSSTWTVDHQMLWGEALLITPVLQPGKAEVTGYFPLGTWYDLQTVPVEALGSLPPPPAAPREPAIHSEGQWVTLPAPLDTINVHLREGYIIPLQGPGLTTTESRKQPMALAVALTKSGEARGELFWDDGESLEVLERGAYTQVIFEARNNTIVNELVHVTSEGAGLQLGKVTVLGVATAPQQVLSNGRPVSNFTYSPDTKVLDICVALLMGEQFLVSWC

SEQ ID NO: 321 - DNA, 2832 bp, synthetic construct
  misc_feature 1..2832: note = Variant of the Homo Sapiens Lysosomal alpha-glucosidase
  source 1..2832: mol_type = other DNA
atggaatggagctgggtctttctcttcttcctgtcagtaacgactggtgtccactccggacacattctggtgcatgatttttctaccgtgcctagagagctttccggttcaagtcaagtcctcgaagaaacacatccagcccatcaggttggcgcatctaggccgggccctcgggacgctcaactccacccagggagacctagggccgttcccactcagtgcgacgtgccagagaactcacgcttcgattgtgcacctgagaaggctatcacgcaagagcagtgcgaggcccgcggatgttgttacataccggctaaacaggggctgcagggtgcgcagatgggccaaccttggtgcttcttcccaccatcctatccgagttacaagctggagaatctctcccagtctgaaatgggatataccgcaacactgactcggaccaccccctccttctttcccaaagatatcttgactctgagacttgacgtaatgatggagacagaaaacaggctccactttaccattaaggaccctgccaatcgccgatacgaggtgcctctggaaacaccacacgtgcacagtagagctccatcacctctgtattctgtcgagttctccgaagagccgtttggcgttatcgtcaggaggcagctcgacgggcgagtgcttctgaacacgactgtggccccgttgttctttgcggatcagtttctgcaactgtcaacaagtctcccttctcagtacattaccgggcttgcagagcatctgtccccactcatgctgagtacttcatggaacaaaatcacactgtggaatagagaccttgctcctactccaggagccaacttgtatggttctcaccctttctacttggccctggaagatggcggatcagcgcatggcgtattcctcctgaattccaacgcaatggacgttgttcttcagccatctcctgctttgagttggagatctacaggcgggatactggacgtctacatctttctgggtccagagcctaaatccgtagtgcagcagtatcttgatgtcgtcggatacccgtttatgccaccatattggggcctggggttccacttgtgccgctggggatattcatccaccgccattacacgacaagttgttgagaatatgaccagggcacattttcctctggatgtacagtggaacgacctggactacatggatagtcgccgcgacttcaccttcaataaggatgggttcagagactttcctgctatggtccaagaacttcaccagggaggcaggaggtacatgatgatcgtagatccgggaatttcttcttctggcccagccggttcatacagaccgtatgacgaaggactgcgacgaggcgtctttatcacgaacgagactggtcagcctttgataggcaaggtttggccagggtccaccgctttcccggatttcacaaatcctgaggcactggcctggtgggaagatatggtcgccgagtttcacgaccaggtcccatttgacgggatgtggatcgacatgaacgagccatccaacttcattagaggaagtgtggatggctgtccgaataatgagctggaaaaccctccttacgtaccaggcgttgttggtgggactcttcaagctgcgacgatttgcgcatcctcccatcagttcctgtcaacccactataacttgcacaatctgtacgggacaacagaggctatcgccagtcatagggccctggtaaaagctagaggaacacgccctttcgttatctctcgctcaacttttgcaggccacggtaggtatgccggacattggaccggcgacgtctggagttcttgggaacagctggcttcctccgttccagagatattgcagtttaacctgttgggagtcccacttgtaggtgcagatgtttgtggcttcctggggaacacctcagaagaattgtgcgtaagatggactcaactgggcgccttctacccttttatgcgcaatcacaactcactgacatctttgcctcaagaaccgtactcatttagtgagccagcacagcaggccatgaggaaggctcttggcctgagatatgcacttctgccgcatctgtacacccttttccaccaggctcatgtccatggagagactgttgcacgacctctgttcttggagttcccaaaagactcttccacgtggacagtcgatcaccagatgctgtggggcgaggctctgctgattacacctgtattgcaacctggtaaggccgaagttaccgggtactttccattggggacctggtatgatctgcaaacagtcccggttgaagctcttggaagtcttccacctccacctgctgcaccaagggagcctgcgatccactctgaaggacagtgggtaactttgcctgcaccgctggacaccatcaatgtccatctgcgcgaaggctacatcataccacttcaaggtcctggactgaccactacagagtctagaaaacaaccaatggctcttgctgttgcactgactaaaagcggcgaagcaaggggtgagctgttctgggacgacggagagtcactggaggtactcgaacgaggcgcgtatacgcaggtcatttttgaggctcgcaataatacgatcgttaacgagctggtccacgtcacttcagaaggtgcaggccttcagttgggcaaggtaactgtcctgggagttgctacagcaccgcagcaggtcttgtccaacggacggcccgtaagcaactttacctatagtcctgataccaaagttctggacatctgcgttgctctgctgatgggtgagcagttcctggtatcatggtgc

SEQ ID NO: 322 - protein, 944 aa, synthetic construct
  REGION 1..944: note = Variant of the Homo Sapiens Lysosomal alpha-glucosidase
MEWSWVFLFFLSVTTGVHSGHILVHDFSTVPRELSGSSQVLEETHPAHQVGASRPGPRDAQLHPGRPRAVPTQCDVPENSRFDCAPEKAITQEQCEARGCCYIPAKQGLQGAQMGQPWCFFPPSYPSYKLENLSQSEMGYTATLTRTTPSFFPKDILTLRLDVMMETENRLHFTIKDPANRRYEVPLETPHVHSRAPSPLYSVEFSEEPFGVIVRRQLDGRVLLNTTVAPLFFADQFLQLSTSLPSQYITGLAEHLSPLMLSTSWNKITLWNRDLAPTPGANLYGSHPFYLALEDGGSAHGVFLLNSNAMDVVLQPSPALSWRSTGGILDVYIFLGPEPKSVVQQYLDVVGYPFMPPYWGLGFHLCRWGYSSTAITRQVVENMTRAHFPLDVQWNDLDYMDSRRDFTFNKDGFRDFPAMVQELHQGGRRYMMIVDPGISSSGPAGSYRPYDEGLRRGVFITNETGQPLIGKVWPGSTAFPDFTNPEALAWWEDMVAEFHDQVPFDGMWIDMNEPSNFIRGSVDGCPNNELENPPYVPGVVGGTLQAATICASSHQFLSTHYNLHNLYGTTEAIASHRALVKARGTRPFVISRSTFAGHGRYAGHWTGDVWSSWEQLASSVPEILQFNLLGVPLVGADVCGFLGNTSEELCVRWTQLGAFYPFMRNHNSLTSLPQEPYSFSEPAQQAMRKALGLRYALLPHLYTLFHQAHVHGETVARPLFLEFPKDSSTWTVDHQMLWGEALLITPVLQPGKAEVTGYFPLGTWYDLQTVPVEALGSLPPPPAAPREPAIHSEGQWVTLPAPLDTINVHLREGYIIPLQGPGLTTTESRKQPMALAVALTKSGEARGELFWDDGESLEVLERGAYTQVIFEARNNTIVNELVHVTSEGAGLQLGKVTVLGVATAPQQVLSNGRPVSNFTYSPDTKVLDICVALLMGEQFLVSWC

SEQ ID NO: 323 - DNA, 2832 bp, synthetic construct
  misc_feature 1..2832: note = Variant of the Homo Sapiens Lysosomal alpha-glucosidase
  source 1..2832: mol_type = other DNA
atggaatggagctgggtctttctcttcttcctgtcagtaacgactggtgtccactccggacacattctgtggcatgatttttctaccgtgcctagagagctttccggttcaagtcaagtcctcgaagaaacacatccagcccatcaggttggcgcatctaggccgggccctcgggacgctcaactccacccagggagacctagggccgttcccactcagtgcgacgtgccagagaactcacgcttcgattgtgcacctgagaaggctatcacgcaagagcagtgcgaggcccgcggatgttgttacataccggctaaacaggggctgcagggtgcgcagatgggccaaccttggtgcttcttcccaccatcctatccgagttacaagctggagaatctctcccagtctgaaatgggatataccgcaacactgactcggaccaccccctccttctttcccaaagatatcttgactctgagacttgacgtaatgatggagacagaaaacaggctccactttaccattaaggaccctgccaatcgccgatacgaggtgcctctggaaacaccacacgtgcacagtagagctccatcacctctgtattctgtcgagttctccgaagagccgtttggcgttatcgtcaggaggcagctcgacgggcgagtgcttctgaacacgactgtggccccgttgttctttgcggatcagtttctgcaactgtcaacaagtctcccttctcagtacattaccgggcttgcagagcatctgtccccactcatgctgagtacttcatggaacaaaatcacactgtggaatagagaccttgctcctactccaggagccaacttgtatggttctcaccctttctacttggccctggaagatggcggatcagcgcatggcgtattcctcctgaattccaacgcaatggacgttgttcttcagccatctcctgctttgagttggagatctacaggcgggatactggacgtctacatctttctgggtccagagcctaaatccgtagtgcagcagtatcttgatgtcgtcggatacccgtttatgccaccatattggggcctggggttccacttgtgccgctggggatattcatccaccgccattacacgacaagttgttgagaatatgaccagggcacattttcctctggatgtacagtggaacgacctggactacatggatagtcgccgcgacttcaccttcaataaggatgggttcagagactttcctgctatggtccaagaacttcaccagggaggcaggaggtacatgatgatcgtagatccgggaatttcttcttctggcccagccggttcatacagaccgtatgacgaaggactgcgacgaggcgtctttatcacgaacgagactggtcagcctttgataggcaaggtttggccagggtccaccgctttcccggatttcacaaatcctgaggcactggcctggtgggaagatatggtcgccgagtttcacgaccaggtcccatttgacgggatgtggatcgacatgaacgagccatccaacttcattagaggaagtgtggatggctgtccgaataatgagctggaaaaccctccttacgtaccaggcgttgttggtgggactcttcaagctgcgacgatttgcgcatcctcccatcagttcctgtcaacccactataacttgcacaatctgtacgggacaacagaggctatcgccagtcatagggccctggtaaaagctagaggaacacgccctttcgttatctctcgctcaacttttgcaggccacggtaggtatgccggacattggaccggcgacgtctggagttcttgggaacagctggcttcctccgttccagagatattgcagtttaacctgttgggagtcccacttgtaggtgcagatgtttgtggcttcctggggaacacctcagaagaattgtgcgtaagatggactcaactgggcgccttctacccttttatgcgcaatcacaactcactgacatctttgcctcaagaaccgtactcatttagtgagccagcacagcaggccatgaggaaggctcttggcctgagatatgcacttctgccgcatctgtacacccttttccaccaggctcatgtccatggagagactgttgcacgacctctgttcttggagttcccaaaagactcttccacgtggacagtcgatcaccagatgctgtggggcgaggctctgctgattacacctgtattgcaacctggtaaggccgaagttaccgggtactttccattggggacctggtatgatctgcaaacagtcccggttgaagctcttggaagtcttccacctccacctgctgcaccaagggagcctgcgatccactctgaaggacagtgggtaactttgcctgcaccgctggacaccatcaatgtccatctgcgcgaaggctacatcataccacttcaaggtcctggactgaccactacagagtctagaaaacaaccaatggctcttgctgttgcactgactaaaagcggcgaagcaaggggtgagctgttctgggacgacggagagtcactggaggtactcgaacgaggcgcgtatacgcaggtcatttttgaggctcgcaataatacgatcgttaacgagctggtccacgtcacttcagaaggtgcaggccttcagttgggcaaggtaactgtcctgggagttgctacagcaccgcagcaggtcttgtccaacggatcgcccgtaagcaactttacctatagtcctgataccaaagttctggacatctgcgttgctctgctgatgggtgagcagttcctggtatcatggtgc

SEQ ID NO: 324 - protein, 944 aa, synthetic construct
  REGION 1..944: note = Variant of the Homo Sapiens Lysosomal alpha-glucosidase
MEWSWVFLFFLSVTTGVHSGHILWHDFSTVPRELSGSSQVLEETHPAHQVGASRPGPRDAQLHPGRPRAVPTQCDVPENSRFDCAPEKAITQEQCEARGCCYIPAKQGLQGAQMGQPWCFFPPSYPSYKLENLSQSEMGYTATLTRTTPSFFPKDILTLRLDVMMETENRLHFTIKDPANRRYEVPLETPHVHSRAPSPLYSVEFSEEPFGVIVRRQLDGRVLLNTTVAPLFFADQFLQLSTSLPSQYITGLAEHLSPLMLSTSWNKITLWNRDLAPTPGANLYGSHPFYLALEDGGSAHGVFLLNSNAMDVVLQPSPALSWRSTGGILDVYIFLGPEPKSVVQQYLDVVGYPFMPPYWGLGFHLCRWGYSSTAITRQVVENMTRAHFPLDVQWNDLDYMDSRRDFTFNKDGFRDFPAMVQELHQGGRRYMMIVDPGISSSGPAGSYRPYDEGLRRGVFITNETGQPLIGKVWPGSTAFPDFTNPEALAWWEDMVAEFHDQVPFDGMWIDMNEPSNFIRGSVDGCPNNELENPPYVPGVVGGTLQAATICASSHQFLSTHYNLHNLYGTTEAIASHRALVKARGTRPFVISRSTFAGHGRYAGHWTGDVWSSWEQLASSVPEILQFNLLGVPLVGADVCGFLGNTSEELCVRWTQLGAFYPFMRNHNSLTSLPQEPYSFSEPAQQAMRKALGLRYALLPHLYTLFHQAHVHGETVARPLFLEFPKDSSTWTVDHQMLWGEALLITPVLQPGKAEVTGYFPLGTWYDLQTVPVEALGSLPPPPAAPREPAIHSEGQWVTLPAPLDTINVHLREGYIIPLQGPGLTTTESRKQPMALAVALTKSGEARGELFWDDGESLEVLERGAYTQVIFEARNNTIVNELVHVTSEGAGLQLGKVTVLGVATAPQQVLSNGSPVSNFTYSPDTKVLDICVALLMGEQFLVSWC

SEQ ID NO: 325 - DNA, 2832 bp, synthetic construct
  misc_feature 1..2832: note = Variant of the Homo Sapiens Lysosomal alpha-glucosidase
  source 1..2832: mol_type = other DNA
atggaatggagctgggtctttctcttcttcctgtcagtaacgactggtgtccactccggacacattctgtggcatgatttttctaccgtgcctagagagctttccggttcaagtcaagtcctcgaagaaacacatccagcccatcaggttggcgcatctaggccgggccctcgggacgctcaactccacccagggagacctagggccgttcccactcagtgcgacgtgccaatgaactcacgcttcgattgtgcacctgagaaggctatcacgcaagagcagtgcgaggcccgcggatgttgttacataccggctaaacaggggctgcagggtgcgcagatgggccaaccttggtgcttcttcccaccatcctatccgagttacaagctggagaatctctcccagtctgaaatgggatataccgcaacactgactcggaccaccccctccttctttcccaaagatatcttgactctgagacttgacgtaatgatggagacagaaaacaggctccactttaccattaaggaccctgccaatcgccgatacgaggtgcctctggaaacaccacacgtgcacagtagagctccatcacctctgtattctgtcgagttctccgaagagccgtttggcgttatcgtcaggaggcagctcgacgggcgagtgcttctgaacacgactgtggccccgttgttctttgcggatcagtttctgcaactgtcaacaagtctcccttctcagtacattaccgggcttgcagagcatctgtccccactcatgctgagtacttcatggaacaaaatcacactgtggaatagagaccttgctcctactccaggagccaacttgtatggttctcaccctttctacttggccctggaagatggcggatcagcgcatggcgtattcctcctgaattccaacgcaatggacgttgttcttcagccatctcctgctttgagttggagatctacaggcgggatactggacgtctacatctttctgggtccagagcctaaatccgtagtgcagcagtatcttgatgtcgtcggatacccgtttatgccaccatattggggcctggggttccacttgtgccgctggggatattcatccaccgccattacacgacaagttgttgagaatatgaccagggcacattttcctctggatgtacagtggaacgacctggactacatggatagtcgccgcgacttcaccttcaataaggatgggttcagagactttcctgctatggtccaagaacttcaccagggaggcaggaggtacatgatgatcgtagatccgggaatttcttcttctggcccagccggttcatacagaccgtatgacgaaggactgcgacgaggcgtctttatcacgaacgagactggtcagcctttgataggcaaggtttggccagggtccaccgctttcccggatttcacaaatcctgaggcactggcctggtgggaagatatggtcgccgagtttcacgaccaggtcccatttgacgggatgtggatcgacatgaacgagccatccaacttcattagaggaagtgtggatggctgtccgaataatgagctggaaaaccctccttacgtaccaggcgttgttggtgggactcttcaagctgcgacgatttgcgcatcctcccatcagttcctgtcaacccactataacttgcacaatctgtacgggacaacagaggctatcgccagtcatagggccctggtaaaagctagaggaacacgccctttcgttatctctcgctcaacttttgcaggccacggtaggtatgccggacattggaccggcgacgtctggagttcttgggaacagctggcttcctccgttccagagatattgcagtttaacctgttgggagtcccacttgtaggtgcagatgtttgtggcttcctggggaacacctcagaagaattgtgcgtaagatggactcaactgggcgccttctacccttttatgcgcaatcacaactcactgacatctttgcctcaagaaccgtactcatttagtgagccagcacagcaggccatgaggaaggctcttggcctgagatatgcacttctgccgcatctgtacacccttttccaccaggctcatgtccatggagagactgttgcacgacctctgttcttggagttcccaaaagactcttccacgtggacagtcgatcaccagatgctgtggggcgaggctctgctgattacacctgtattgcaacctggtaaggccgaagttaccgggtactttccattggggacctggtatgatctgcaaacagtcccggttgaagctcttggaagtcttccacctccacctgctgcaccaagggagcctgcgatccactctgaaggacagtgggtaactttgcctgcaccgctggacaccatcaatgtccatctgcgcgaaggctacatcataccacttcaaggtcctggactgaccactacagagtctagaaaacaaccaatggctcttgctgttgcactgactaaaagcggcgaagcaaggggtgagctgttctgggacgacggagagtcactggaggtactcgaacgaggcgcgtatacgcaggtcatttttgaggctcgcaataatacgatcgttaacgagctggtccacgtcacttcagaaggtgcaggccttcagttgggcaaggtaactgtcctgggagttgctacagcaccgcagcaggtcttgtccaacggacggcccgtaagcaactttacctatagtcctgataccaaagttctggacatctgcgttgctctgctgatgggtgagcagttcctggtatcatggtgc

SEQ ID NO: 326 - protein, 944 aa, synthetic construct
  REGION 1..944: note = Variant of the Homo Sapiens Lysosomal alpha-glucosidase
MEWSWVFLFFLSVTTGVHSGHILWHDFSTVPRELSGSSQVLEETHPAHQVGASRPGPRDAQLHPGRPRAVPTQCDVPMNSRFDCAPEKAITQEQCEARGCCYIPAKQGLQGAQMGQPWCFFPPSYPSYKLENLSQSEMGYTATLTRTTPSFFPKDILTLRLDVMMETENRLHFTIKDPANRRYEVPLETPHVHSRAPSPLYSVEFSEEPFGVIVRRQLDGRVLLNTTVAPLFFADQFLQLSTSLPSQYITGLAEHLSPLMLSTSWNKITLWNRDLAPTPGANLYGSHPFYLALEDGGSAHGVFLLNSNAMDVVLQPSPALSWRSTGGILDVYIFLGPEPKSVVQQYLDVVGYPFMPPYWGLGFHLCRWGYSSTAITRQVVENMTRAHFPLDVQWNDLDYMDSRRDFTFNKDGFRDFPAMVQELHQGGRRYMMIVDPGISSSGPAGSYRPYDEGLRRGVFITNETGQPLIGKVWPGSTAFPDFTNPEALAWWEDMVAEFHDQVPFDGMWIDMNEPSNFIRGSVDGCPNNELENPPYVPGVVGGTLQAATICASSHQFLSTHYNLHNLYGTTEAIASHRALVKARGTRPFVISRSTFAGHGRYAGHWTGDVWSSWEQLASSVPEILQFNLLGVPLVGADVCGFLGNTSEELCVRWTQLGAFYPFMRNHNSLTSLPQEPYSFSEPAQQAMRKALGLRYALLPHLYTLFHQAHVHGETVARPLFLEFPKDSSTWTVDHQMLWGEALLITPVLQPGKAEVTGYFPLGTWYDLQTVPVEALGSLPPPPAAPREPAIHSEGQWVTLPAPLDTINVHLREGYIIPLQGPGLTTTESRKQPMALAVALTKSGEARGELFWDDGESLEVLERGAYTQVIFEARNNTIVNELVHVTSEGAGLQLGKVTVLGVATAPQQVLSNGRPVSNFTYSPDTKVLDICVALLMGEQFLVSWC

SEQ ID NO: 327 - DNA, 2832 bp, synthetic construct
  misc_feature 1..2832: note = Variant of the Homo Sapiens Lysosomal alpha-glucosidase
  source 1..2832: mol_type = other DNA
atggaatggagctgggtctttctcttcttcctgtcagtaacgactggtgtccactccggacacattctgtggcatgatttttctaccgtgcctagagagctttccggttcaagtcaagtcctcgaagaaacacatccagcccatcagaggggcgcatctaggccgggccctcgggacgctcaactccacccagggagacctagggccgttcccactcagtgcgacgtgccagagaactcacgcttcgattgtgcacctgagaaggctatcacgcaagagcagtgcgaggcccgcggatgttgttacataccggctaaacaggggctgcagggtgcgcagatgggccaaccttggtgcttcttcccaccatcctatccgagttacaagctggagaatctctcccagtctgaaatgggatataccgcaacactgactcggaccaccccctccttctttcccaaagatatcttgactctgagacttgacgtaatgatggagacagaaaacaggctccactttaccattaaggaccctgccaatcgccgatacgaggtgcctctggaaacaccacacgtgcacagtagagctccatcacctctgtattctgtcgagttctccgaagagccgtttggcgttatcgtcaggaggcagctcgacgggcgagtgcttctgaacacgactgtggccccgttgttctttgcggatcagtttctgcaactgtcaacaagtctcccttctcagtacattaccgggcttgcagagcatctgtccccactcatgctgagtacttcatggaacaaaatcacactgtggaatagagaccttgctcctactccaggagccaacttgtatggttctcaccctttctacttggccctggaagatggcggatcagcgcatggcgtattcctcctgaattccaacgcaatggacgttgttcttcagccatctcctgctttgagttggagatctacaggcgggatactggacgtctacatctttctgggtccagagcctaaatccgtagtgcagcagtatcttgatgtcgtcggatacccgtttatgccaccatattggggcctggggttccacttgtgccgctggggatattcatccaccgccattacacgacaagttgttgagaatatgaccagggcacattttcctctggatgtacagtggaacgacctggactacatggatagtcgccgcgacttcaccttcaataaggatgggttcagagactttcctgctatggtccaagaacttcaccagggaggcaggaggtacatgatgatcgtagatccgggaatttcttcttctggcccagccggttcatacagaccgtatgacgaaggactgcgacgaggcgtctttatcacgaacgagactggtcagcctttgataggcaaggtttggccagggtccaccgctttcccggatttcacaaatcctgaggcactggcctggtgggaagatatggtcgccgagtttcacgaccaggtcccatttgacgggatgtggatcgacatgaacgagccatccaacttcattagaggaagtgtggatggctgtccgaataatgagctggaaaaccctccttacgtaccaggcgttgttggtgggactcttcaagctgcgacgatttgcgcatcctcccatcagttcctgtcaacccactataacttgcacaatctgtacgggacaacagaggctatcgccagtcatagggccctggtaaaagctagaggaacacgccctttcgttatctctcgctcaacttttgcaggccacggtaggtatgccggacattggaccggcgacgtctggagttcttgggaacagctggcttcctccgttccagagatattgcagtttaacctgttgggagtcccacttgtaggtgcagatgtttgtggcttcctggggaacacctcagaagaattgtgcgtaagatggactcaactgggcgccttctacccttttatgcgcaatcacaactcactgacatctttgcctcaagaaccgtactcatttagtgagccagcacagcaggccatgaggaaggctcttggcctgagatatgcacttctgccgcatctgtacacccttttccaccaggctcatgtccatggagagactgttgcacgacctctgttcttggagttcccaaaagactcttccacgtggacagtcgatcaccagatgctgtggggcgaggctctgctgattacacctgtattgcaacctggtaaggccgaagttaccgggtactttccattggggacctggtatgatctgcaaacagtcccggttgaagctcttggaagtcttccacctccacctgctgcaccaagggagcctgcgatccactctgaaggacagtgggtaactttgcctgcaccgctggacaccatcaatgtccatctgcgcgaaggctacatcataccacttcaaggtcctggactgaccactacagagtctagaaaacaaccaatggctcttgctgttgcactgactaaaagcggcgaagcaaggggtgagctgttctgggacgacggagagtcactggaggtactcgaacgaggcgcgtatacgcaggtcatttttgaggctcgcaataatacgatcgttaacgagctggtccacgtcacttcagaaggtgcaggccttcagttgggcaaggtaactgtcctgggagttgctacagcaccgcagcaggtcttgtccaacggacggcccgtaagcaactttacctatagtcctgataccaaagttctggacatctgcgttgctctgctgatgggtgagcagttcctggtatcatggtgc

SEQ ID NO: 328 - protein, 944 aa, synthetic construct
  REGION 1..944: note = Variant of the Homo Sapiens Lysosomal alpha-glucosidase
MEWSWVFLFFLSVTTGVHSGHILWHDFSTVPRELSGSSQVLEETHPAHQRGASRPGPRDAQLHPGRPRAVPTQCDVPENSRFDCAPEKAITQEQCEARGCCYIPAKQGLQGAQMGQPWCFFPPSYPSYKLENLSQSEMGYTATLTRTTPSFFPKDILTLRLDVMMETENRLHFTIKDPANRRYEVPLETPHVHSRAPSPLYSVEFSEEPFGVIVRRQLDGRVLLNTTVAPLFFADQFLQLSTSLPSQYITGLAEHLSPLMLSTSWNKITLWNRDLAPTPGANLYGSHPFYLALEDGGSAHGVFLLNSNAMDVVLQPSPALSWRSTGGILDVYIFLGPEPKSVVQQYLDVVGYPFMPPYWGLGFHLCRWGYSSTAITRQVVENMTRAHFPLDVQWNDLDYMDSRRDFTFNKDGFRDFPAMVQELHQGGRRYMMIVDPGISSSGPAGSYRPYDEGLRRGVFITNETGQPLIGKVWPGSTAFPDFTNPEALAWWEDMVAEFHDQVPFDGMWIDMNEPSNFIRGSVDGCPNNELENPPYVPGVVGGTLQAATICASSHQFLSTHYNLHNLYGTTEAIASHRALVKARGTRPFVISRSTFAGHGRYAGHWTGDVWSSWEQLASSVPEILQFNLLGVPLVGADVCGFLGNTSEELCVRWTQLGAFYPFMRNHNSLTSLPQEPYSFSEPAQQAMRKALGLRYALLPHLYTLFHQAHVHGETVARPLFLEFPKDSSTWTVDHQMLWGEALLITPVLQPGKAEVTGYFPLGTWYDLQTVPVEALGSLPPPPAAPREPAIHSEGQWVTLPAPLDTINVHLREGYIIPLQGPGLTTTESRKQPMALAVALTKSGEARGELFWDDGESLEVLERGAYTQVIFEARNNTIVNELVHVTSEGAGLQLGKVTVLGVATAPQQVLSNGRPVSNFTYSPDTKVLDICVALLMGEQFLVSWC

SEQ ID NO: 329 - DNA, 2832 bp, synthetic construct
  misc_feature 1..2832: note = Variant of the Homo Sapiens Lysosomal alpha-glucosidase
  source 1..2832: mol_type = other DNA
atggaatggagctgggtctttctcttcttcctgtcagtaacgactggtgtccactccggacacattctgtggcatgatttttctaccgtgcctagagagctttccggttcaagtcaagtcctcgaagaaacacatccagcccatcaggttggcgcatctaggccgggccctcgggacgctcaactccacccagggagacctagggccgttcccactcagtgcgacgtgccagagaactcacgcttcgattgtgcacctgagaaggctatcacgcaagagcagtgcgaggcccgcggatgttgttacataccggctaaacaggggctgcagggtgcgcagatgggccaaccttggtgcttcttcccaccatcctatccgagttacaagctggagaatctctcccagtctgaaatgggatataccgcaacactgactcggaccaccccctccttctttcccaaagatatcttgactctgagacttgacgtaatgatggagacagaaaacaggctccactttaccattaaggaccctgccaatcgccgatacgaggtgcctctggaaacaccacacgtgcacagtagagctccatcacctctgtattctgtcgagttctccgaagagccgtttggcgttatcgtcaggaggcagctcgacgggcgagtgcttctgaacacgactgtggccccgttgttctttgcggatcagtttctgcaactgtcaacaagtctcccttctcagtacattaccgggcttgcagagcatctgtccccactcatgctgagtacttcatggaacaaaatcacactgtggaatagagaccttgctcctactccaggagccaacttgtatggttctcaccctttctacttggccctggaagatggcggatcagcgcatggcgtattcctcctgaattccaacgcaatggacgttgttcttcagccatctcctgctttgagttggagatctacaggcgggatactggacgtctacatctttctgggtccagagcctaaatccgtagtgcagcagtatcttgatgtcgtcggatacccgtttatgccaccatattggggcctggggttccacttgtgccgctggggatattcatccaccgccattacacgacaagttgttgagaatatgaccagggcacattttcctctggatgtacagtggaacgacctggactacatggatagtcgccgcgacttcaccttcaataaggatgggttcagagactttcctgctatggtccaagaacttcaccagggaggcaggaggtacatgatgatcgtagatccgggaatttcttcttctggcccagccggttcatacagaccgtatgacgaaggactgcgacgaggcgtctttatcacgaacgagactggtcagcctttgataggcaaggtttggccagggtccaccgctttcccggatttcacaaatcctgaggcactggcctggtgggaagatatggtcgccgagtttcacgaccaggtcccatttgacgggatgtggatcgacatgaacgagccatccaacttcattagaggaagtgtggatggctgtccgaataatgagctggaaaaccctccttacgtaccaggcgttgttggtgggactcttcaagctgcgacgatttgcgcatcctcccatcagttcctgtcaacccactataacttgcacaatctgtacgggacaacagaggctatcgccagtcatagggccctggtaaaagctagaggaacacgccctttcgttatctctcgctcaacttttgcaggccacggtaggtatgccggacattggaccggcgacgtctggagttcttgggaacagctggcttcctccgttccagagatattgcagtttaacctgttgggagtcccacttgtaggtgcagatgtttgtggcttcctggggaacacctcagaagaattgtgcgtaagatggactcaactgggcgccttctacccttttatgcgcaatcacaactcactgcagtctttgcctcaagaaccgtactcatttagtgagccagcacagcaggccatgaggaaggctcttggcctgagatatgcacttctgccgcatctgtacacccttttccaccaggctcatgtccatggagagactgttgcacgacctctgttcttggagttcccaaaagactcttccacgtggacagtcgatcaccagatgctgtggggcgaggctctgctgattacacctgtattgcaacctggtaaggccgaagttaccgggtactttccattggggacctggtatgatctgcaaacagtcccggttgaagctcttggaagtcttccacctccacctgctgcaccaagggagcctgcgatccactctgaaggacagtgggtaactttgcctgcaccgctggacaccatcaatgtccatctgcgcgaaggctacatcataccacttcaaggtcctggactgaccactacagagtctagaaaacaaccaatggctcttgctgttgcactgactaaaagcggcgaagcaaggggtgagctgttctgggacgacggagagtcactggaggtactcgaacgaggcgcgtatacgcaggtcatttttgaggctcgcaataatacgatcgttaacgagctggtccacgtcacttcagaaggtgcaggccttcagttgggcaaggtaactgtcctgggagttgctacagcaccgcagcaggtcttgtccaacggacggcccgtaagcaactttacctatagtcctgataccaaagttctggacatctgcgttgctctgctgatgggtgagcagttcctggtatcatggtgc

SEQ ID NO: 330 - protein, 944 aa, synthetic construct
  REGION 1..944: note = Variant of the Homo Sapiens Lysosomal alpha-glucosidase
MEWSWVFLFFLSVTTGVHSGHILWHDFSTVPRELSGSSQVLEETHPAHQVGASRPGPRDAQLHPGRPRAVPTQCDVPENSRFDCAPEKAITQEQCEARGCCYIPAKQGLQGAQMGQPWCFFPPSYPSYKLENLSQSEMGYTATLTRTTPSFFPKDILTLRLDVMMETENRLHFTIKDPANRRYEVPLETPHVHSRAPSPLYSVEFSEEPFGVIVRRQLDGRVLLNTTVAPLFFADQFLQLSTSLPSQYITGLAEHLSPLMLSTSWNKITLWNRDLAPTPGANLYGSHPFYLALEDGGSAHGVFLLNSNAMDVVLQPSPALSWRSTGGILDVYIFLGPEPKSVVQQYLDVVGYPFMPPYWGLGFHLCRWGYSSTAITRQVVENMTRAHFPLDVQWNDLDYMDSRRDFTFNKDGFRDFPAMVQELHQGGRRYMMIVDPGISSSGPAGSYRPYDEGLRRGVFITNETGQPLIGKVWPGSTAFPDFTNPEALAWWEDMVAEFHDQVPFDGMWIDMNEPSNFIRGSVDGCPNNELENPPYVPGVVGGTLQAATICASSHQFLSTHYNLHNLYGTTEAIASHRALVKARGTRPFVISRSTFAGHGRYAGHWTGDVWSSWEQLASSVPEILQFNLLGVPLVGADVCGFLGNTSEELCVRWTQLGAFYPFMRNHNSLQSLPQEPYSFSEPAQQAMRKALGLRYALLPHLYTLFHQAHVHGETVARPLFLEFPKDSSTWTVDHQMLWGEALLITPVLQPGKAEVTGYFPLGTWYDLQTVPVEALGSLPPPPAAPREPAIHSEGQWVTLPAPLDTINVHLREGYIIPLQGPGLTTTESRKQPMALAVALTKSGEARGELFWDDGESLEVLERGAYTQVIFEARNNTIVNELVHVTSEGAGLQLGKVTVLGVATAPQQVLSNGRPVSNFTYSPDTKVLDICVALLMGEQFLVSWC

SEQ ID NO: 331 - DNA, 2832 bp, synthetic construct
  misc_feature 1..2832: note = Variant of the Homo Sapiens Lysosomal alpha-glucosidase
  source 1..2832: mol_type = other DNA
atggaatggagctgggtctttctcttcttcctgtcagtaacgactggtgtccactccggacacattctgtggcatgatttttctaccgtgcctagagagctttccggttcaagtcaagtcctcgaagaaacacatccagcccatcaggttggcgcatctaggccgggccctcgggacgctcaaacgcacccagggagacctagggccgttcccactcagtgcgacgtgccagagaactcacgcttcgattgtgcacctgagaaggctatcacgcaagagcagtgcgaggcccgcggatgttgttacataccggctaaacaggggctgcagggtgcgcagatgggccaaccttggtgcttcttcccaccatcctatccgagttacaagctggagaatctctcccagtctgaaatgggatataccgcaacactgactcggaccaccccctccttctttcccaaagatatcttgactctgagacttgacgtaatgatggagacagaaaacaggctccactttaccattaaggaccctgccaatcgccgatacgaggtgcctctggaaacaccacacgtgcacagtagagctccatcacctctgtattctgtcgagttctccgaagagccgtttggcgttatcgtcaggaggcagctcgacgggcgagtgcttctgaacacgactgtggccccgttgttctttgcggatcagtttctgcaactgtcaacaagtctcccttctcagtacattaccgggcttgcagagcatctgtccccactcatgctgagtacttcatggaacaaaatcacactgtggaatagagaccttgctcctactccaggagccaacttgtatggttctcaccctttctacttggccctggaagatggcggatcagcgcatggcgtattcctcctgaattccaacgcaatggacgttgttcttcagccatctcctgctttgagttggagatctacaggcgggatactggacgtctacatctttctgggtccagagcctaaatccgtagtgcagcagtatcttgatgtcgtcggatacccgtttatgccaccatattggggcctggggttccacttgtgccgctggggatattcatccaccgccattacacgacaagttgttgagaatatgaccagggcacattttcctctggatgtacagtggaacgacctggactacatggatagtcgccgcgacttcaccttcaataaggatgggttcagagactttcctgctatggtccaagaacttcaccagggaggcaggaggtacatgatgatcgtagatccgggaatttcttcttctggcccagccggttcatacagaccgtatgacgaaggactgcgacgaggcgtctttatcacgaacgagactggtcagcctttgataggcaaggtttggccagggtccaccgctttcccggatttcacaaatcctgaggcactggcctggtgggaagatatggtcgccgagtttcacgaccaggtcccatttgacgggatgtggatcgacatgaacgagccatccaacttcattagaggaagtgtggatggctgtccgaataatgagctggaaaaccctccttacgtaccaggcgttgttggtgggactcttcaagctgcgacgatttgcgcatcctcccatcagttcctgtcaacccactataacttgcacaatctgtacgggacaacagaggctatcgccagtcatagggccctggtaaaagctagaggaacacgccctttcgttatctctcgctcaacttttgcaggccacggtaggtatgccggacattggaccggcgacgtctggagttcttgggaacagctggcttcctccgttccagagatattgcagtttaacctgttgggagtcccacttgtaggtgcagatgtttgtggcttcctggggaacacctcagaagaattgtgcgtaagatggactcaactgggcgccttctacccttttatgcgcaatcacaactcactgacatctttgcctcaagaaccgtactcatttagtgagccagcacagcaggccatgaggaaggctcttggcctgagatatgcacttctgccgcatctgtacacccttttccaccaggctcatgtccatggagagactgttgcacgacctctgttcttggagttcccaaaagactcttccacgtggacagtcgatcaccagatgctgtggggcgaggctctgctgattacacctgtattgcaacctggtaaggccgaagttaccgggtactttccattggggacctggtatgatctgcaaacagtcccggttgaagctcttggaagtcttccacctccacctgctgcaccaagggagcctgcgatccactctgaaggacagtgggtaactttgcctgcaccgctggacaccatcaatgtccatctgcgcgaaggctacatcataccacttcaaggtcctggactgaccactacagagtctagaaaacaaccaatggctcttgctgttgcactgactaaaagcggcgaagcaaggggtgagctgttctgggacgacggagagtcactggaggtactcgaacgaggcgcgtatacgcaggtcatttttgaggctcgcaataatacgatcgttaacgagctggtccacgtcacttcagaaggtgcaggccttcagttgggcaaggtaactgtcctgggagttgctacagcaccgcagcaggtcttgtccaacggacggcccgtaagcaactttacctatagtcctgataccaaagttctggacatctgcgttgctctgctgatgggtgagcagttcctggtatcatggtgc

SEQ ID NO: 332 - protein, 944 aa, synthetic construct
  REGION 1..944: note = Variant of the Homo Sapiens Lysosomal alpha-glucosidase
MEWSWVFLFFLSVTTGVHSGHILWHDFSTVPRELSGSSQVLEETHPAHQVGASRPGPRDAQTHPGRPRAVPTQCDVPENSRFDCAPEKAITQEQCEARGCCYIPAKQGLQGAQMGQPWCFFPPSYPSYKLENLSQSEMGYTATLTRTTPSFFPKDILTLRLDVMMETENRLHFTIKDPANRRYEVPLETPHVHSRAPSPLYSVEFSEEPFGVIVRRQLDGRVLLNTTVAPLFFADQFLQLSTSLPSQYITGLAEHLSPLMLSTSWNKITLWNRDLAPTPGANLYGSHPFYLALEDGGSAHGVFLLNSNAMDVVLQPSPALSWRSTGGILDVYIFLGPEPKSVVQQYLDVVGYPFMPPYWGLGFHLCRWGYSSTAITRQVVENMTRAHFPLDVQWNDLDYMDSRRDFTFNKDGFRDFPAMVQELHQGGRRYMMIVDPGISSSGPAGSYRPYDEGLRRGVFITNETGQPLIGKVWPGSTAFPDFTNPEALAWWEDMVAEFHDQVPFDGMWIDMNEPSNFIRGSVDGCPNNELENPPYVPGVVGGTLQAATICASSHQFLSTHYNLHNLYGTTEAIASHRALVKARGTRPFVISRSTFAGHGRYAGHWTGDVWSSWEQLASSVPEILQFNLLGVPLVGADVCGFLGNTSEELCVRWTQLGAFYPFMRNHNSLTSLPQEPYSFSEPAQQAMRKALGLRYALLPHLYTLFHQAHVHGETVARPLFLEFPKDSSTWTVDHQMLWGEALLITPVLQPGKAEVTGYFPLGTWYDLQTVPVEALGSLPPPPAAPREPAIHSEGQWVTLPAPLDTINVHLREGYIIPLQGPGLTTTESRKQPMALAVALTKSGEARGELFWDDGESLEVLERGAYTQVIFEARNNTIVNELVHVTSEGAGLQLGKVTVLGVATAPQQVLSNGRPVSNFTYSPDTKVLDICVALLMGEQFLVSWC

SEQ ID NO: 333 - DNA, 2832 bp, synthetic construct
  misc_feature 1..2832: note = Variant of the Homo Sapiens Lysosomal alpha-glucosidase
  source 1..2832: mol_type = other DNA
atggaatggagctgggtctttctcttcttcctgtcagtaacgactggtgtccactccggacacattctgtggcatgatttttctaccgtgcctagagagctttccggttcaagtcaagtcctcgaagaaacacatccagcccatcaggttggcgcatctaggccgggccctcgggacgctcaactccacccagggagacctagggccgttcccactcagtgcgacgtgccagagaactcacgcttcgattgtgcacctgagaaggctatcacgcaagagcagtgcgaggcccgcggatgttgttacataccggctaaacaggggctgcagggtgcgcagatgggccaaccttggtgcttcttcccaccatcctatccgagttacaagctggagaatctctcccagtctgaaatgggatataccgcaacactgactcggaccaccccctccttctttcccaaagatatcttgactctgagacttgacgtaatgatggagacagaaaacaggctccactttaccattaaggaccctgccaatcgccgatacgaggtgcctctggaaacaccacacgtgcacagtagagctccatcacctctgtattctgtcgagttctccgaagagccgtttggcgttatcgtcaggaggcagctcgacgggcgagtgcttctgaacacgactgtggccccgttgttctttgcggatcagtttctgcaactgtcaacaagtctcccttctcagtacattaccgggcttgcagagcatctgtccccactcatgctgagtacttcatggaacaaaatcacactgtggaatagagaccttgctcctactccaggagccaacttgtatggttctcaccctttctacttggccctggaagatggcggatcagcgcatggcgtattcctcctgaattccaacgcaatggacgttgttcttcagccatctcctgctttgagttggagatctacaggcgggatactggacgtctacatctttctgggtccagagcctaaatccgtagtgcagcagtatcttgatgtcgtcggatacccgtttatgccaccatattggggcctggggttccacttgtgccgctggggatattcatccaccgccattacacgacaagttgttgagaatatgaccagggcacattttcctctggatgtacagtggaacgacctggactacatggatagtcgccgcgacttcaccttcaataaggatgggttcagagactttcctgctatggtccaagaacttcaccagggaggcaggaggtacatgatgatcgtagatccgggaatttcttcttctggcccagccggttcatacagaccgtatgacgaaggactgcgacgaggcgtctttatcacgaacgagactggtcagcctttgataggcaaggtttggccagggtccaccgctttcccggatttcacaaatcctgaggcactggcctggtgggaagatatggtcgccgagtttcacgaccaggtcccatttgacgggatgtggatcgacatgaacgagccatccaacttcattagaggaagtgtggatggctgtccgaataatgagctggaaaaccctccttacgtaccaggcgttgttggtgggactcttcaagctgcgacgatttgcgcatcctcccatcagttcctgtcaacccactataacttgcacaatctgtacgggacaacagaggctatcgccagtcatagggccctggtaaaagctagaggaacacgccctttcgttatctctcgctcaacttttgcaggccacggtaggtatgccggacattggaccggcgacgtctggagttcttgggaacagctggcttcctccgttccagagatattgcagtttaacctgttgggagtcccacttgtaggtgcagatgtttgtggcttcctggggaacacctcagaagaattgtgcgtaagatggactcaactgggcgccttctacccttttatgcgcaatcacaactcactgacatctttgcctcaagaaccgtactcatttagtgagccagcacagcaggccatgaggaaggctcttggcctgagatatgcacttctgccgcatctgtacacccttttccaccaggctcatgtccatggagagactgttgcacgacctctgttcttggagttcccaaaagactcttccacgtggacagtcgatcaccagatgctgtggggcgaggctctgctgattacacctgtattgcaacctggtaaggccgaagttaccgggtactttccattggggacctggtatgatctgcaaacagtcccggttgaagctcttggaagtcttccacctccacctgctgcaccaagggagcctgcgatccactctgaaggacagtgggtaactttgcctgcaccgctggacaccatcaatgtccatctgcgcgaaggctacatcataccacttcaaggtcctggactgaccactacagagtctagaaaacaaccaatggctcttgctgttgcactgactaaaagcggcgaagcaaggggtgagctgttctgggacgacggagagtcactggaggtactcgaacgaggcgcgtatacgcaggtcatttttgaggctcgcaataatacgatcgttaacgagctggtccacgtcacttcagaaggtgcaggccttcagttgatgaaggtaactgtcctgggagttgctacagcaccgcagcaggtcttgtccaacggacggcccgtaagcaactttacctatagtcctgataccaaagttctggacatctgcgttgctctgctgatgggtgagcagttcctggtatcatggtgc

SEQ ID NO: 334 - protein, 944 aa, synthetic construct
  REGION 1..944: note = Variant of the Homo Sapiens Lysosomal alpha-glucosidase
MEWSWVFLFFLSVTTGVHSGHILWHDFSTVPRELSGSSQVLEETHPAHQVGASRPGPRDAQLHPGRPRAVPTQCDVPENSRFDCAPEKAITQEQCEARGCCYIPAKQGLQGAQMGQPWCFFPPSYPSYKLENLSQSEMGYTATLTRTTPSFFPKDILTLRLDVMMETENRLHFTIKDPANRRYEVPLETPHVHSRAPSPLYSVEFSEEPFGVIVRRQLDGRVLLNTTVAPLFFADQFLQLSTSLPSQYITGLAEHLSPLMLSTSWNKITLWNRDLAPTPGANLYGSHPFYLALEDGGSAHGVFLLNSNAMDVVLQPSPALSWRSTGGILDVYIFLGPEPKSVVQQYLDVVGYPFMPPYWGLGFHLCRWGYSSTAITRQVVENMTRAHFPLDVQWNDLDYMDSRRDFTFNKDGFRDFPAMVQELHQGGRRYMMIVDPGISSSGPAGSYRPYDEGLRRGVFITNETGQPLIGKVWPGSTAFPDFTNPEALAWWEDMVAEFHDQVPFDGMWIDMNEPSNFIRGSVDGCPNNELENPPYVPGVVGGTLQAATICASSHQFLSTHYNLHNLYGTTEAIASHRALVKARGTRPFVISRSTFAGHGRYAGHWTGDVWSSWEQLASSVPEILQFNLLGVPLVGADVCGFLGNTSEELCVRWTQLGAFYPFMRNHNSLTSLPQEPYSFSEPAQQAMRKALGLRYALLPHLYTLFHQAHVHGETVARPLFLEFPKDSSTWTVDHQMLWGEALLITPVLQPGKAEVTGYFPLGTWYDLQTVPVEALGSLPPPPAAPREPAIHSEGQWVTLPAPLDTINVHLREGYIIPLQGPGLTTTESRKQPMALAVALTKSGEARGELFWDDGESLEVLERGAYTQVIFEARNNTIVNELVHVTSEGAGLQLMKVTVLGVATAPQQVLSNGRPVSNFTYSPDTKVLDICVALLMGEQFLVSWC

SEQ ID NO: 335 - DNA, 2832 bp, synthetic construct
  misc_feature 1..2832: note = Variant of the Homo Sapiens Lysosomal alpha-glucosidase
  source 1..2832: mol_type = other DNA
atggaatggagctgggtctttctcttcttcctgtcagtaacgactggtgtccactccggacacattctgtggcatgatttttctaccgtgcctagagagctttccggttcaagtcaagtcctcgaagaaacacatccagcccatcagaagggcgcatctaggccgggccctcgggacgctcaactccacccagggagacctagggccgttcccactcagtgcgacgtgccagagaactcacgcttcgattgtgcacctgagaaggctatcacgcaagagcagtgcgaggcccgcggatgttgttacataccggctaaacaggggctgcagggtgcgcagatgggccaaccttggtgcttcttcccaccatcctatccgagttacaagctggagaatctctcccagtctgaaatgggatataccgcaacactgactcggaccaccccctccttctttcccaaagatatcttgactctgagacttgacgtaatgatggagacagaaaacaggctccactttaccattaaggaccctgccaatcgccgatacgaggtgcctctggaaacaccacacgtgcacagtagagctccatcacctctgtattctgtcgagttctccgaagagccgtttggcgttatcgtcaggaggcagctcgacgggcgagtgcttctgaacacgactgtggccccgttgttctttgcggatcagtttctgcaactgtcaacaagtctcccttctcagtacattaccgggcttgcagagcatctgtccccactcatgctgagtacttcatggaacaaaatcacactgtggaatagagaccttgctcctactccaggagccaacttgtatggttctcaccctttctacttggccctggaagatggcggatcagcgcatggcgtattcctcctgaattccaacgcaatggacgttgttcttcagccatctcctgctttgagttggagatctacaggcgggatactggacgtctacatctttctgggtccagagcctaaatccgtagtgcagcagtatcttgatgtcgtcggatacccgtttatgccaccatattggggcctggggttccacttgtgccgctggggatattcatccaccgccattacacgacaagttgttgagaatatgaccagggcacattttcctctggatgtacagtggaacgacctggactacatggatagtcgccgcgacttcaccttcaataaggatgggttcagagactttcctgctatggtccaagaacttcaccagggaggcaggaggtacatgatgatcgtagatccgggaatttcttcttctggcccagccggttcatacagaccgtatgacgaaggactgcgacgaggcgtctttatcacgaacgagactggtcagcctttgataggcaaggtttggccagggtccaccgctttcccggatttcacaaatcctgaggcactggcctggtgggaagatatggtcgccgagtttcacgaccaggtcccatttgacgggatgtggatcgacatgaacgagccatccaacttcattagaggaagtgtggatggctgtccgaataatgagctggaaaaccctccttacgtaccaggcgttgttggtgggactcttcaagctgcgacgatttgcgcatcctcccatcagttcctgtcaacccactataacttgcacaatctgtacgggacaacagaggctatcgccagtcatagggccctggtaaaagctagaggaacacgccctttcgttatctctcgctcaacttttgcaggccacggtaggtatgccggacattggaccggcgacgtctggagttcttgggaacagctggcttcctccgttccagagatattgcagtttaacctgttgggagtcccacttgtaggtgcagatgtttgtggcttcctggggaacacctcagaagaattgtgcgtaagatggactcaactgggcgccttctacccttttatgcgcaatcacaactcactgacatctttgcctcaagaaccgtactcatttagtgagccagcacagcaggccatgaggaaggctcttggcctgagatatgcacttctgccgcatctgtacacccttttccaccaggctcatgtccatggagagactgttgcacgacctctgttcttggagttcccaaaagactcttccacgtggacagtcgatcaccagatgctgtggggcgaggctctgctgattacacctgtattgcaacctggtaaggccgaagttaccgggtactttccattggggacctggtatgatctgcaaacagtcccggttgaagctcttggaagtcttccacctccacctgctgcaccaagggagcctgcgatccactctgaaggacagtgggtaactttgcctgcaccgctggacaccatcaatgtccatctgcgcgaaggctacatcataccacttcaaggtcctggactgaccactacagagtctagaaaacaaccaatggctcttgctgttgcactgactaaaagcggcgaagcaaggggtgagctgttctgggacgacggagagtcactggaggtactcgaacgaggcgcgtatacgcaggtcatttttgaggctcgcaataatacgatcgttaacgagctggtccacgtcacttcagaaggtgcaggccttcagttgggcaaggtaactgtcctgggagttgctacagcaccgcagcaggtcttgtccaacggacggcccgtaagcaactttacctatagtcctgataccaaagttctggacatctgcgttgctctgctgatgggtgagcagttcctggtatcatggtgc

SEQ ID NO: 336 - protein, 944 aa, synthetic construct
  REGION 1..944: note = Variant of the Homo Sapiens Lysosomal alpha-glucosidase
MEWSWVFLFFLSVTTGVHSGHILWHDFSTVPRELSGSSQVLEETHPAHQKGASRPGPRDAQLHPGRPRAVPTQCDVPENSRFDCAPEKAITQEQCEARGCCYIPAKQGLQGAQMGQPWCFFPPSYPSYKLENLSQSEMGYTATLTRTTPSFFPKDILTLRLDVMMETENRLHFTIKDPANRRYEVPLETPHVHSRAPSPLYSVEFSEEPFGVIVRRQLDGRVLLNTTVAPLFFADQFLQLSTSLPSQYITGLAEHLSPLMLSTSWNKITLWNRDLAPTPGANLYGSHPFYLALEDGGSAHGVFLLNSNAMDVVLQPSPALSWRSTGGILDVYIFLGPEPKSVVQQYLDVVGYPFMPPYWGLGFHLCRWGYSSTAITRQVVENMTRAHFPLDVQWNDLDYMDSRRDFTFNKDGFRDFPAMVQELHQGGRRYMMIVDPGISSSGPAGSYRPYDEGLRRGVFITNETGQPLIGKVWPGSTAFPDFTNPEALAWWEDMVAEFHDQVPFDGMWIDMNEPSNFIRGSVDGCPNNELENPPYVPGVVGGTLQAATICASSHQFLSTHYNLHNLYGTTEAIASHRALVKARGTRPFVISRSTFAGHGRYAGHWTGDVWSSWEQLASSVPEILQFNLLGVPLVGADVCGFLGNTSEELCVRWTQLGAFYPFMRNHNSLTSLPQEPYSFSEPAQQAMRKALGLRYALLPHLYTLFHQAHVHGETVARPLFLEFPKDSSTWTVDHQMLWGEALLITPVLQPGKAEVTGYFPLGTWYDLQTVPVEALGSLPPPPAAPREPAIHSEGQWVTLPAPLDTINVHLREGYIIPLQGPGLTTTESRKQPMALAVALTKSGEARGELFWDDGESLEVLERGAYTQVIFEARNNTIVNELVHVTSEGAGLQLGKVTVLGVATAPQQVLSNGRPVSNFTYSPDTKVLDICVALLMGEQFLVSWC

SEQ ID NO: 337 - DNA, 2832 bp, synthetic construct
  misc_feature 1..2832: note = Variant of the Homo Sapiens Lysosomal alpha-glucosidase
  source 1..2832: mol_type = other DNA
atggaatggagctgggtctttctcttcttcctgtcagtaacgactggtgtccactccggacacattctgtggcatgatttttctaccgtgcctagagagctttccggttcaagtcaagtcctcgaagaaacacatccagcccatcaggttggcgcatctaggccgggccctcgggacgctcaactccacccagggagacctagggccgttcccactcagtgcgacgtgccaaataactcacgcttcgattgtgcacctgagaaggctatcacgcaagagcagtgcgaggcccgcggatgttgttacataccggctaaacaggggctgcagggtgcgcagatgggccaaccttggtgcttcttcccaccatcctatccgagttacaagctggagaatctctcccagtctgaaatgggatataccgcaacactgactcggaccaccccctccttctttcccaaagatatcttgactctgagacttgacgtaatgatggagacagaaaacaggctccactttaccattaaggaccctgccaatcgccgatacgaggtgcctctggaaacaccacacgtgcacagtagagctccatcacctctgtattctgtcgagttctccgaagagccgtttggcgttatcgtcaggaggcagctcgacgggcgagtgcttctgaacacgactgtggccccgttgttctttgcggatcagtttctgcaactgtcaacaagtctcccttctcagtacattaccgggcttgcagagcatctgtccccactcatgctgagtacttcatggaacaaaatcacactgtggaatagagaccttgctcctactccaggagccaacttgtatggttctcaccctttctacttggccctggaagatggcggatcagcgcatggcgtattcctcctgaattccaacgcaatggacgttgttcttcagccatctcctgctttgagttggagatctacaggcgggatactggacgtctacatctttctgggtccagagcctaaatccgtagtgcagcagtatcttgatgtcgtcggatacccgtttatgccaccatattggggcctggggttccacttgtgccgctggggatattcatccaccgccattacacgacaagttgttgagaatatgaccagggcacattttcctctggatgtacagtggaacgacctggactacatggatagtcgccgcgacttcaccttcaataaggatgggttcagagactttcctgctatggtccaagaacttcaccagggaggcaggaggtacatgatgatcgtagatccgggaatttcttcttctggcccagccggttcatacagaccgtatgacgaaggactgcgacgaggcgtctttatcacgaacgagactggtcagcctttgataggcaaggtttggccagggtccaccgctttcccggatttcacaaatcctgaggcactggcctggtgggaagatatggtcgccgagtttcacgaccaggtcccatttgacgggatgtggatcgacatgaacgagccatccaacttcattagaggaagtgtggatggctgtccgaataatgagctggaaaaccctccttacgtaccaggcgttgttggtgggactcttcaagctgcgacgatttgcgcatcctcccatcagttcctgtcaacccactataacttgcacaatctgtacgggacaacagaggctatcgccagtcatagggccctggtaaaagctagaggaacacgccctttcgttatctctcgctcaacttttgcaggccacggtaggtatgccggacattggaccggcgacgtctggagttcttgggaacagctggcttcctccgttccagagatattgcagtttaacctgttgggagtcccacttgtaggtgcagatgtttgtggcttcctggggaacacctcagaagaattgtgcgtaagatggactcaactgggcgccttctacccttttatgcgcaatcacaactcactgacatctttgcctcaagaaccgtactcatttagtgagccagcacagcaggccatgaggaaggctcttggcctgagatatgcacttctgccgcatctgtacacccttttccaccaggctcatgtccatggagagactgttgcacgacctctgttcttggagttcccaaaagactcttccacgtggacagtcgatcaccagatgctgtggggcgaggctctgctgattacacctgtattgcaacctggtaaggccgaagttaccgggtactttccattggggacctggtatgatctgcaaacagtcccggttgaagctcttggaagtcttccacctccacctgctgcaccaagggagcctgcgatccactctgaaggacagtgggtaactttgcctgcaccgctggacaccatcaatgtccatctgcgcgaaggctacatcataccacttcaaggtcctggactgaccactacagagtctagaaaacaaccaatggctcttgctgttgcactgactaaaagcggcgaagcaaggggtgagctgttctgggacgacggagagtcactggaggtactcgaacgaggcgcgtatacgcaggtcatttttgaggctcgcaataatacgatcgttaacgagctggtccacgtcacttcagaaggtgcaggccttcagttgggcaaggtaactgtcctgggagttgctacagcaccgcagcaggtcttgtccaacggacggcccgtaagcaactttacctatagtcctgataccaaagttctggacatctgcgttgctctgctgatgggtgagcagttcctggtatcatggtgc

SEQ ID NO: 338 - protein, 944 aa, synthetic construct
  REGION 1..944: note = Variant of the Homo Sapiens Lysosomal alpha-glucosidase
MEWSWVFLFFLSVTTGVHSGHILWHDFSTVPRELSGSSQVLEETHPAHQVGASRPGPRDAQLHPGRPRAVPTQCDVPNNSRFDCAPEKAITQEQCEARGCCYIPAKQGLQGAQMGQPWCFFPPSYPSYKLENLSQSEMGYTATLTRTTPSFFPKDILTLRLDVMMETENRLHFTIKDPANRRYEVPLETPHVHSRAPSPLYSVEFSEEPFGVIVRRQLDGRVLLNTTVAPLFFADQFLQLSTSLPSQYITGLAEHLSPLMLSTSWNKITLWNRDLAPTPGANLYGSHPFYLALEDGGSAHGVFLLNSNAMDVVLQPSPALSWRSTGGILDVYIFLGPEPKSVVQQYLDVVGYPFMPPYWGLGFHLCRWGYSSTAITRQVVENMTRAHFPLDVQWNDLDYMDSRRDFTFNKDGFRDFPAMVQELHQGGRRYMMIVDPGISSSGPAGSYRPYDEGLRRGVFITNETGQPLIGKVWPGSTAFPDFTNPEALAWWEDMVAEFHDQVPFDGMWIDMNEPSNFIRGSVDGCPNNELENPPYVPGVVGGTLQAATICASSHQFLSTHYNLHNLYGTTEAIASHRALVKARGTRPFVISRSTFAGHGRYAGHWTGDVWSSWEQLASSVPEILQFNLLGVPLVGADVCGFLGNTSEELCVRWTQLGAFYPFMRNHNSLTSLPQEPYSFSEPAQQAMRKALGLRYALLPHLYTLFHQAHVHGETVARPLFLEFPKDSSTWTVDHQMLWGEALLITPVLQPGKAEVTGYFPLGTWYDLQTVPVEALGSLPPPPAAPREPAIHSEGQWVTLPAPLDTINVHLREGYIIPLQGPGLTTTESRKQPMALAVALTKSGEARGELFWDDGESLEVLERGAYTQVIFEARNNTIVNELVHVTSEGAGLQLGKVTVLGVATAPQQVLSNGRPVSNFTYSPDTKVLDICVALLMGEQFLVSWC

SEQ ID NO: 339 - DNA, 2832 bp, synthetic construct
  misc_feature 1..2832: note = Variant of the Homo Sapiens Lysosomal alpha-glucosidase
  source 1..2832: mol_type = other DNA
atggaatggagctgggtctttctcttcttcctgtcagtaacgactggtgtccactccggacacattctgtggcatgatttttctaccgtgcctagagagctttccggttcaagtcaagtcctcgaagaaacacatccagcccatcaggttggcgcatctaggccgggccctcgggacgctcaactccacccagggagacctagggccgttcccactcagtgcgacgtgccagagaactcacgcttcgattgtgcacctgagaaggctatcacgcaagagcagtgcgaggcccgcggatgttgttacataccggctaaacaggggctgcagggtgcgcagatgggccaaccttggtgcttcttcccaccatcctatccgagttacaagctggagaatctctcccagtctgaaatgggatataccgcaacactgactcggaccaccccctccttctttcccaaagatatcttgactctgagacttgacgtaatgatggagacagaaaacaggctccactttaccattaaggaccctgccaatcgccgatacgaggtgcctctggaaacaccacacgtgcacagtagagctccatcacctctgtattctgtcgagttctccgaagagccgtttggcgttatcgtcaggaggcagctcgacgggcgagtgcttctgaacacgactgtggccccgttgttctttgcggatcagtttctgcaactgtcaacaagtctcccttctcagtacattaccgggcttgcagagcatctgtccccactcatgctgagtacttcatggaacaaaatcacactgtggaatagagaccttgctcctactccaggagccaacttgtatggttctcaccctttctacttggccctggaagatggcggatcagcgcatggcgtattcctcctgaattccaacgcaatggacgttgttcttcagccatctcctgctttgagttggagatctacaggcgggatactggacgtctacatctttctgggtccagagcctaaatccgtagtgcagcagtatcttgatgtcgtcggatacccgtttatgccaccatattggggcctggggttccacttgtgccgctggggatattcatccaccgccattacacgacaagttgttgagaatatgaccagggcacattttcctctggatgtacagtggaacgacctggactacatggatagtcgccgcgacttcaccttcaataaggatgggttcagagactttcctgctatggtccaagaacttcaccagggaggcaggaggtacatgatgatcgtagatccgggaatttcttcttctggcccagccggttcatacagaccgtatgacgaaggactgcgacgaggcgtctttatcacgaacgagactggtcagcctttgataggcaaggtttggccagggtccaccgctttcccggatttcacaaatcctgaggcactggcctggtgggaagatatggtcgccgagtttcacgaccaggtcccatttgacgggatgtggatcgacatgaacgagccatccaacttcattagaggaagtgtggatggctgtccgaataatgagctggaaaaccctccttacgtaccaggcgttgttggtgggactcttcaagctgcgacgatttgcgcatcctcccatcagttcctgtcaacccactataacttgcacaatctgtacgggacaacagaggctatcgccagtcatagggccctggtaaaagctagaggaacacgccctttcgttatctctcgctcaacttttgcaggccacggtaggtatgccggacattggaccggcgacgtctggagttcttgggaacagctggcttcctccgttccagagatattgcagtttaacctgttgggagtcccacttgtaggtgcagatgtttgtggcttcctggggaacacctcagaagaattgtgcgtaagatggactcaactgggcgccttctacccttttatgcgcaatcacaactcactgacatctttgcctcaagaaccgtactcatttagtgagccagcacagcaggccatgaggaaggctcttggcctgagatatgcacttctgccgcatctgtacacccttttccaccaggctcatgtccatggagagactgttgcacgacctctgttcttggagttcccaaaagactcttccacgtggacagtcgatcaccagatgctgtggggcgaggctctgctgattacacctgtattgcaactgggtaaggccgaagttaccgggtactttccattggggacctggtatgatctgcaaacagtcccggttgaagctcttggaagtcttccacctccacctgctgcaccaagggagcctgcgatccactctgaaggacagtgggtaactttgcctgcaccgctggacaccatcaatgtccatctgcgcgaaggctacatcataccacttcaaggtcctggactgaccactacagagtctagaaaacaaccaatggctcttgctgttgcactgactaaaagcggcgaagcaaggggtgagctgttctgggacgacggagagtcactggaggtactcgaacgaggcgcgtatacgcaggtcatttttgaggctcgcaataatacgatcgttaacgagctggtccacgtcacttcagaaggtgcaggccttcagttgggcaaggtaactgtcctgggagttgctacagcaccgcagcaggtcttgtccaacggacggcccgtaagcaactttacctatagtcctgataccaaagttctggacatctgcgttgctctgctgatgggtgagcagttcctggtatcatggtgc

SEQ ID NO: 340 - protein, 944 aa, synthetic construct
  REGION 1..944: note = Variant of the Homo Sapiens Lysosomal alpha-glucosidase
MEWSWVFLFFLSVTTGVHSGHILWHDFSTVPRELSGSSQVLEETHPAHQVGASRPGPRDAQLHPGRPRAVPTQCDVPENSRFDCAPEKAITQEQCEARGCCYIPAKQGLQGAQMGQPWCFFPPSYPSYKLENLSQSEMGYTATLTRTTPSFFPKDILTLRLDVMMETENRLHFTIKDPANRRYEVPLETPHVHSRAPSPLYSVEFSEEPFGVIVRRQLDGRVLLNTTVAPLFFADQFLQLSTSLPSQYITGLAEHLSPLMLSTSWNKITLWNRDLAPTPGANLYGSHPFYLALEDGGSAHGVFLLNSNAMDVVLQPSPALSWRSTGGILDVYIFLGPEPKSVVQQYLDVVGYPFMPPYWGLGFHLCRWGYSSTAITRQVVENMTRAHFPLDVQWNDLDYMDSRRDFTFNKDGFRDFPAMVQELHQGGRRYMMIVDPGISSSGPAGSYRPYDEGLRRGVFITNETGQPLIGKVWPGSTAFPDFTNPEALAWWEDMVAEFHDQVPFDGMWIDMNEPSNFIRGSVDGCPNNELENPPYVPGVVGGTLQAATICASSHQFLSTHYNLHNLYGTTEAIASHRALVKARGTRPFVISRSTFAGHGRYAGHWTGDVWSSWEQLASSVPEILQFNLLGVPLVGADVCGFLGNTSEELCVRWTQLGAFYPFMRNHNSLTSLPQEPYSFSEPAQQAMRKALGLRYALLPHLYTLFHQAHVHGETVARPLFLEFPKDSSTWTVDHQMLWGEALLITPVLQLGKAEVTGYFPLGTWYDLQTVPVEALGSLPPPPAAPREPAIHSEGQWVTLPAPLDTINVHLREGYIIPLQGPGLTTTESRKQPMALAVALTKSGEARGELFWDDGESLEVLERGAYTQVIFEARNNTIVNELVHVTSEGAGLQLGKVTVLGVATAPQQVLSNGRPVSNFTYSPDTKVLDICVALLMGEQFLVSWC

SEQ ID NO: 341 - DNA, 2832 bp, synthetic construct
  misc_feature 1..2832: note = Variant of the Homo Sapiens Lysosomal alpha-glucosidase
  source 1..2832: mol_type = other DNA
atggaatggagctgggtctttctcttcttcctgtcagtaacgactggtgtccactccggacacattctgtggcatgatttttctaccgtgcctagagagctttccggttcaagtcaagtcctcgaagaaacacatccagcccatcaggttggcgcatctaggccgggccctcgggacgctcaactccacccagggagacctagggccgttcccactcagtgcgacgtgccagagaactcacgcttcgattgtgcacctgagaaggctatcacgcaagagcagtgcgaggcccgcggatgttgttacataccggctaaacaggggctgcagggtgcgcagatgggccaaccttggtgcttcttcccaccatcctatccgagttacaagctggagaatctctcccagtctgaaatgggatataccgcaacactgactcggaccaccccctccttctttcccaaagatatcttgactctgagacttgacgtaatgatggagacagaaaacaggctccactttaccattaaggaccctgccaatcgccgatacgaggtgcctctggaaacaccacacgtgcacagtagagctccatcacctctgtattctgtcgagttctccgaagagccgtttggcgttatcgtcaggaggcagctcgacgggcgagtgcttctgaacacgactgtggccccgttgttctttgcggatcagtttctgcaactgtcaacaagtctcccttctcagtacattaccgggcttgcagagcatctgtccccactcatgctgagtacttcatggaacaaaatcacactgtggaatagagaccttgctcctactccaggagccaacttgtatggttctcaccctttctacttggccctggaagatggcggatcagcgcatggcgtattcctcctgaattccaacgcaatggacgttgttcttcagccatctcctgctttgagttggagatctacaggcgggatactggacgtctacatctttctgggtccagagcctaaatccgtagtgcagcagtatcttgatgtcgtcggatacccgtttatgccaccatattggggcctggggttccacttgtgccgctggggatattcatccaccgccattacacgacaagttgttgagaatatgaccagggcacattttcctctggatgtacagtggaacgacctggactacatggatagtcgccgcgacttcaccttcaataaggatgggttcagagactttcctgctatggtccaagaacttcaccagggaggcaggaggtacatgatgatcgtagatccgggaatttcttcttctggcccagccggttcatacagaccgtatgacgaaggactgcgacgaggcgtctttatcacgaacgagactggtcagcctttgataggcaaggtttggccagggtccaccgctttcccggatttcacaaatcctgaggcactggcctggtgggaagatatggtcgccgagtttcacgaccaggtcccatttgacgggatgtggatcgacatgaacgagccatccaacttcattagaggaagtgtggatggctgtccgaataatgagctggaaaaccctccttacgtaccaggcgttgttggtgggactcttcaagctgcgacgatttgcgcatcctcccatcagttcctgtcaacccactataacttgcacaatctgtacgggacaacagaggctatcgccagtcatagggccctggtaaaagctagaggaacacgccctttcgttatctctcgctcaacttttgcaggccacggtaggtatgccggacattggaccggcgacgtctggagttcttgggaacagctggcttcctccgttccagagatattgcagtttaacctgttgggagtcccacttgtaggtgcagatgtttgtggcttcctggggaacacctcagaagaattgtgcgtaagatggactcaactgggcgccttctacccttttatgcgcaatcacaactcactgacatctttgcctcaagaaccgtactcatttagtgagccagcacagcaggccatgaggaaggctcttggcctgagatatgcacttctgccgcatctgtacacccttttccaccaggctcatgtccatggagagactgttgcacgacctctgttcttggagttcccaaaagactcttccacgtggacagtcgatcaccagatgctgtggggcgaggctctgctgattacacctgtattgcaacggggtaaggccgaagttaccgggtactttccattggggacctggtatgatctgcaaacagtcccggttgaagctcttggaagtcttccacctccacctgctgcaccaagggagcctgcgatccactctgaaggacagtgggtaactttgcctgcaccgctggacaccatcaatgtccatctgcgcgaaggctacatcataccacttcaaggtcctggactgaccactacagagtctagaaaacaaccaatggctcttgctgttgcactgactaaaagcggcgaagcaaggggtgagctgttctgggacgacggagagtcactggaggtactcgaacgaggcgcgtatacgcaggtcatttttgaggctcgcaataatacgatcgttaacgagctggtccacgtcacttcagaaggtgcaggccttcagttgggcaaggtaactgtcctgggagttgctacagcaccgcagcaggtcttgtccaacggacggcccgtaagcaactttacctatagtcctgataccaaagttctggacatctgcgttgctctgctgatgggtgagcagttcctggtatcatggtgc

SEQ ID NO: 342 - protein, 944 aa, synthetic construct
  REGION 1..944: note = Variant of the Homo Sapiens Lysosomal alpha-glucosidase
MEWSWVFLFFLSVTTGVHSGHILWHDFSTVPRELSGSSQVLEETHPAHQVGASRPGPRDAQLHPGRPRAVPTQCDVPENSRFDCAPEKAITQEQCEARGCCYIPAKQGLQGAQMGQPWCFFPPSYPSYKLENLSQSEMGYTATLTRTTPSFFPKDILTLRLDVMMETENRLHFTIKDPANRRYEVPLETPHVHSRAPSPLYSVEFSEEPFGVIVRRQLDGRVLLNTTVAPLFFADQFLQLSTSLPSQYITGLAEHLSPLMLSTSWNKITLWNRDLAPTPGANLYGSHPFYLALEDGGSAHGVFLLNSNAMDVVLQPSPALSWRSTGGILDVYIFLGPEPKSVVQQYLDVVGYPFMPPYWGLGFHLCRWGYSSTAITRQVVENMTRAHFPLDVQWNDLDYMDSRRDFTFNKDGFRDFPAMVQELHQGGRRYMMIVDPGISSSGPAGSYRPYDEGLRRGVFITNETGQPLIGKVWPGSTAFPDFTNPEALAWWEDMVAEFHDQVPFDGMWIDMNEPSNFIRGSVDGCPNNELENPPYVPGVVGGTLQAATICASSHQFLSTHYNLHNLYGTTEAIASHRALVKARGTRPFVISRSTFAGHGRYAGHWTGDVWSSWEQLASSVPEILQFNLLGVPLVGADVCGFLGNTSEELCVRWTQLGAFYPFMRNHNSLTSLPQEPYSFSEPAQQAMRKALGLRYALLPHLYTLFHQAHVHGETVARPLFLEFPKDSSTWTVDHQMLWGEALLITPVLQRGKAEVTGYFPLGTWYDLQTVPVEALGSLPPPPAAPREPAIHSEGQWVTLPAPLDTINVHLREGYIIPLQGPGLTTTESRKQPMALAVALTKSGEARGELFWDDGESLEVLERGAYTQVIFEARNNTIVNELVHVTSEGAGLQLGKVTVLGVATAPQQVLSNGRPVSNFTYSPDTKVLDICVALLMGEQFLVSWC

SEQ ID NO: 343 - DNA, 2832 bp, synthetic construct
  misc_feature 1..2832: note = Variant of the Homo Sapiens Lysosomal alpha-glucosidase
  source 1..2832: mol_type = other DNA
atggaatggagctgggtctttctcttcttcctgtcagtaacgactggtgtccactccggacacattctgtggcatgatttttctaccgtgcctagagagctttccggttcaagtcaagtcctcgaagaaacacatccagcccatcaggttggcgcatctaggccgggccctcgggacgctcaactccacccagggagacctagggccgttcccactcagtgcgacgtgccagagaactcacgcttcgattgtgcacctgagaaggctatcacgcaagagcagtgcgaggcccgcggatgttgttacataccggctaaacaggggctgcagggtgcgcagatgggccaaccttggtgcttcttcccaccatcctatccgagttacaagctggagaatctctcccagtctgaaatgggatataccgcaacactgactcggaccaccccctccttctttcccaaagatatcttgactctgagacttgacgtaatgatggagacagaaaacaggctccactttaccattaaggaccctgccaatcgccgatacgaggtgcctctggaaacaccacacgtgcacagtagagctccatcacctctgtattctgtcgagttctccgaagagccgtttggcgttatcgtcaggaggcagctcgacgggcgagtgcttctgaacacgactgtggccccgttgttctttgcggatcagtttctgcaactgtcaacaagtctcccttctcagtacattaccgggcttgcagagcatctgtccccactcatgctgagtacttcatggaacaaaatcacactgtggaatagagaccttgctcctactccaggagccaacttgtatggttctcaccctttctacttggccctggaagatggcggatcagcgcatggcgtattcctcctgaattccaacgcaatggacgttgttcttcagccatctcctgctttgagttggagatctacaggcgggatactggacgtctacatctttctgggtccagagcctaaatccgtagtgcagcagtatcttgatgtcgtcggatacccgtttatgccaccatattggggcctggggttccacttgtgccgctggggatattcatccaccgccattacacgacaagttgttgagaatatgaccagggcacattttcctctggatgtacagtggaacgacctggactacatggatagtcgccgcgacttcaccttcaataaggatgggttcagagactttcctgctatggtccaagaacttcaccagggaggcaggaggtacatgatgatcgtagatccgggaatttcttcttctggcccagccggttcatacagaccgtatgacgaaggactgcgacgaggcgtctttatcacgaacgagactggtcagcctttgataggcaaggtttggccagggtccaccgctttcccggatttcacaaatcctgaggcactggcctggtgggaagatatggtcgccgagtttcacgaccaggtcccatttgacgggatgtggatcgacatgaacgagccatccaacttcattagaggaagtgtggatggctgtccgaataatgagctggaaaaccctccttacgtaccaggcgttgttggtgggactcttcaagctgcgacgatttgcgcatcctcccatcagttcctgtcaacccactataacttgcacaatctgtacggggatacagaggctatcgccagtcatagggccctggtaaaagctagaggaacacgccctttcgttatctctcgctcaacttttgcaggccacggtaggtatgccggacattggaccggcgacgtctggagttcttgggaacagctggcttcctccgttccagagatattgcagtttaacctgttgggagtcccacttgtaggtgcagatgtttgtggcttcctggggaacacctcagaagaattgtgcgtaagatggactcaactgggcgccttctacccttttatgcgcaatcacaactcactgacatctttgcctcaagaaccgtactcatttagtgagccagcacagcaggccatgaggaaggctcttggcctgagatatgcacttctgccgcatctgtacacccttttccaccaggctcatgtccatggagagactgttgcacgacctctgttcttggagttcccaaaagactcttccacgtggacagtcgatcaccagatgctgtggggcgaggctctgctgattacacctgtattgcaacctggtaaggccgaagttaccgggtactttccattggggacctggtatgatctgcaaacagtcccggttgaagctcttggaagtcttccacctccacctgctgcaccaagggagcctgcgatccactctgaaggacagtgggtaactttgcctgcaccgctggacaccatcaatgtccatctgcgcgaaggctacatcataccacttcaaggtcctggactgaccactacagagtctagaaaacaaccaatggctcttgctgttgcactgactaaaagcggcgaagcaaggggtgagctgttctgggacgacggagagtcactggaggtactcgaacgaggcgcgtatacgcaggtcatttttgaggctcgcaataatacgatcgttaacgagctggtccacgtcacttcagaaggtgcaggccttcagttgggcaaggtaactgtcctgggagttgctacagcaccgcagcaggtcttgtccaacggacggcccgtaagcaactttacctatagtcctgataccaaagttctggacatctgcgttgctctgctgatgggtgagcagttcctggtatcatggtgc

SEQ ID NO: 344 - protein, 944 aa, synthetic construct
  REGION 1..944: note = Variant of the Homo Sapiens Lysosomal alpha-glucosidase
MEWSWVFLFFLSVTTGVHSGHILWHDFSTVPRELSGSSQVLEETHPAHQVGASRPGPRDAQLHPGRPRAVPTQCDVPENSRFDCAPEKAITQEQCEARGCCYIPAKQGLQGAQMGQPWCFFPPSYPSYKLENLSQSEMGYTATLTRTTPSFFPKDILTLRLDVMMETENRLHFTIKDPANRRYEVPLETPHVHSRAPSPLYSVEFSEEPFGVIVRRQLDGRVLLNTTVAPLFFADQFLQLSTSLPSQYITGLAEHLSPLMLSTSWNKITLWNRDLAPTPGANLYGSHPFYLALEDGGSAHGVFLLNSNAMDVVLQPSPALSWRSTGGILDVYIFLGPEPKSVVQQYLDVVGYPFMPPYWGLGFHLCRWGYSSTAITRQVVENMTRAHFPLDVQWNDLDYMDSRRDFTFNKDGFRDFPAMVQELHQGGRRYMMIVDPGISSSGPAGSYRPYDEGLRRGVFITNETGQPLIGKVWPGSTAFPDFTNPEALAWWEDMVAEFHDQVPFDGMWIDMNEPSNFIRGSVDGCPNNELENPPYVPGVVGGTLQAATICASSHQFLSTHYNLHNLYGDTEAIASHRALVKARGTRPFVISRSTFAGHGRYAGHWTGDVWSSWEQLASSVPEILQFNLLGVPLVGADVCGFLGNTSEELCVRWTQLGAFYPFMRNHNSLTSLPQEPYSFSEPAQQAMRKALGLRYALLPHLYTLFHQAHVHGETVARPLFLEFPKDSSTWTVDHQMLWGEALLITPVLQPGKAEVTGYFPLGTWYDLQTVPVEALGSLPPPPAAPREPAIHSEGQWVTLPAPLDTINVHLREGYIIPLQGPGLTTTESRKQPMALAVALTKSGEARGELFWDDGESLEVLERGAYTQVIFEARNNTIVNELVHVTSEGAGLQLGKVTVLGVATAPQQVLSNGRPVSNFTYSPDTKVLDICVALLMGEQFLVSWC

SEQ ID NO: 345 - DNA, 2832 bp, synthetic construct
  misc_feature 1..2832: note = Variant of the Homo Sapiens Lysosomal alpha-glucosidase
  source 1..2832: mol_type = other DNA
atggaatggagctgggtctttctcttcttcctgtcagtaacgactggtgtccactccggacacattctgattcatgatttttctaccgtgcctagagagctttccggttcaagtcaagtcctcgaagaaacacatccagcccatcaggttggcgcatctaggccgggccctcgggacgctcaactccacccagggagacctagggccgttcccactcagtgcgacgtgccagagaactcacgcttcgattgtgcacctgagaaggctatcacgcaagagcagtgcgaggcccgcggatgttgttacataccggctaaacaggggctgcagggtgcgcagatgggccaaccttggtgcttcttcccaccatcctatccgagttacaagctggagaatctctcccagtctgaaatgggatataccgcaacactgactcggaccaccccctccttctttcccaaagatatcttgactctgagacttgacgtaatgatggagacagaaaacaggctccactttaccattaaggaccctgccaatcgccgatacgaggtgcctctggaaacaccacacgtgcacagtagagctccatcacctctgtattctgtcgagttctccgaagagccgtttggcgttatcgtcaggaggcagctcgacgggcgagtgcttctgaacacgactgtggccccgttgttctttgcggatcagtttctgcaactgtcaacaagtctcccttctcagtacattaccgggcttgcagagcatctgtccccactcatgctgagtacttcatggaacaaaatcacactgtggaatagagaccttgctcctactccaggagccaacttgtatggttctcaccctttctacttggccctggaagatggcggatcagcgcatggcgtattcctcctgaattccaacgcaatggacgttgttcttcagccatctcctgctttgagttggagatctacaggcgggatactggacgtctacatctttctgggtccagagcctaaatccgtagtgcagcagtatcttgatgtcgtcggatacccgtttatgccaccatattggggcctggggttccacttgtgccgctggggatattcatccaccgccattacacgacaagttgttgagaatatgaccagggcacattttcctctggatgtacagtggaacgacctggactacatggatagtcgccgcgacttcaccttcaataaggatgggttcagagactttcctgctatggtccaagaacttcaccagggaggcaggaggtacatgatgatcgtagatccgggaatttcttcttctggcccagccggttcatacagaccgtatgacgaaggactgcgacgaggcgtctttatcacgaacgagactggtcagcctttgataggcaaggtttggccagggtccaccgctttcccggatttcacaaatcctgaggcactggcctggtgggaagatatggtcgccgagtttcacgaccaggtcccatttgacgggatgtggatcgacatgaacgagccatccaacttcattagaggaagtgtggatggctgtccgaataatgagctggaaaaccctccttacgtaccaggcgttgttggtgggactcttcaagctgcgacgatttgcgcatcctcccatcagttcctgtcaacccactataacttgcacaatctgtacgggacaacagaggctatcgccagtcatagggccctggtaaaagctagaggaacacgccctttcgttatctctcgctcaacttttgcaggccacggtaggtatgccggacattggaccggcgacgtctggagttcttgggaacagctggcttcctccgttccagagatattgcagtttaacctgttgggagtcccacttgtaggtgcagatgtttgtggcttcctggggaacacctcagaagaattgtgcgtaagatggactcaactgggcgccttctacccttttatgcgcaatcacaactcactgacatctttgcctcaagaaccgtactcatttagtgagccagcacagcaggccatgaggaaggctcttggcctgagatatgcacttctgccgcatctgtacacccttttccaccaggctcatgtccatggagagactgttgcacgacctctgttcttggagttcccaaaagactcttccacgtggacagtcgatcaccagatgctgtggggcgaggctctgctgattacacctgtattgcaacctggtaaggccgaagttaccgggtactttccattggggacctggtatgatctgcaaacagtcccggttgaagctcttggaagtcttccacctccacctgctgcaccaagggagcctgcgatccactctgaaggacagtgggtaactttgcctgcaccgctggacaccatcaatgtccatctgcgcgaaggctacatcataccacttcaaggtcctggactgaccactacagagtctagaaaacaaccaatggctcttgctgttgcactgactaaaagcggcgaagcaaggggtgagctgttctgggacgacggagagtcactggaggtactcgaacgaggcgcgtatacgcaggtcatttttgaggctcgcaataatacgatcgttaacgagctggtccacgtcacttcagaaggtgcaggccttcagttgggcaaggtaactgtcctgggagttgctacagcaccgcagcaggtcttgtccaacggacggcccgtaagcaactttacctatagtcctgataccaaagttctggacatctgcgttgctctgctgatgggtgagcagttcctggtatcatggtgc

SEQ ID NO: 346 - protein, 944 aa, synthetic construct
  REGION 1..944: note = Variant of the Homo Sapiens Lysosomal alpha-glucosidase
MEWSWVFLFFLSVTTGVHSGHILIHDFSTVPRELSGSSQVLEETHPAHQVGASRPGPRDAQLHPGRPRAVPTQCDVPENSRFDCAPEKAITQEQCEARGCCYIPAKQGLQGAQMGQPWCFFPPSYPSYKLENLSQSEMGYTATLTRTTPSFFPKDILTLRLDVMMETENRLHFTIKDPANRRYEVPLETPHVHSRAPSPLYSVEFSEEPFGVIVRRQLDGRVLLNTTVAPLFFADQFLQLSTSLPSQYITGLAEHLSPLMLSTSWNKITLWNRDLAPTPGANLYGSHPFYLALEDGGSAHGVFLLNSNAMDVVLQPSPALSWRSTGGILDVYIFLGPEPKSVVQQYLDVVGYPFMPPYWGLGFHLCRWGYSSTAITRQVVENMTRAHFPLDVQWNDLDYMDSRRDFTFNKDGFRDFPAMVQELHQGGRRYMMIVDPGISSSGPAGSYRPYDEGLRRGVFITNETGQPLIGKVWPGSTAFPDFTNPEALAWWEDMVAEFHDQVPFDGMWIDMNEPSNFIRGSVDGCPNNELENPPYVPGVVGGTLQAATICASSHQFLSTHYNLHNLYGTTEAIASHRALVKARGTRPFVISRSTFAGHGRYAGHWTGDVWSSWEQLASSVPEILQFNLLGVPLVGADVCGFLGNTSEELCVRWTQLGAFYPFMRNHNSLTSLPQEPYSFSEPAQQAMRKALGLRYALLPHLYTLFHQAHVHGETVARPLFLEFPKDSSTWTVDHQMLWGEALLITPVLQPGKAEVTGYFPLGTWYDLQTVPVEALGSLPPPPAAPREPAIHSEGQWVTLPAPLDTINVHLREGYIIPLQGPGLTTTESRKQPMALAVALTKSGEARGELFWDDGESLEVLERGAYTQVIFEARNNTIVNELVHVTSEGAGLQLGKVTVLGVATAPQQVLSNGRPVSNFTYSPDTKVLDICVALLMGEQFLVSWC

SEQ ID NO: 347 - DNA, 2832 bp, synthetic construct
  misc_feature 1..2832: note = Variant of the Homo Sapiens Lysosomal alpha-glucosidase
  source 1..2832: mol_type = other DNA
atggaatggagctgggtctttctcttcttcctgtcagtaacgactggtgtccactccggacacattctgtggcatgatttttctaccgtgcctagagagctttccggttcaagtcaagtcctcgaagaaacacatccagcccatcaggttggcgcatctaggccgggccctcgggacgctcaactccacccagggagacctagggccgttcccactcagtgcgacgtgccagagaactcacgcttcgattgtgcacctgagaaggctatcacgcaagagcagtgcgaggcccgcggatgttgttacataccggctaaacaggggctgcagggtgcgcagatgggccaaccttggtgcttcttcccaccatcctatccgagttacaagctggagaatctctcccagtctgaaatgggatataccgcaacactgactcggaccaccccctccttctttcccaaagatatcttgactctgagacttgacgtaatgatggagacagaaaacaggctccactttaccattaaggaccctgccaatcgccgatacgaggtgcctctggaaacaccacacgtgcacagtagagctccatcacctctgtattctgtcgagttctccgaagagccgtttggcgttatcgtcaggaggcagctcgacgggcgagtgcttctgaacacgactgtggccccgttgttctttgcggatcagtttctgcaactgtcaacaagtctcccttctcagtacattaccgggcttgcagagcatctgtccccactcatgctgagtacttcatggaacaaaatcacactgtggaatagagaccttgctcctactccaggagccaacttgtatggttctcaccctttctacttggccctggaagatggcggatcagcgcatggcgtattcctcctgaattccaacgcaatggacgttgttcttcagccatctcctgctttgagttggagatctacaggcgggatactggacgtctacatctttctgggtccagagcctaaatccgtagtgcagcagtatcttgatgtcgtcggatacccgtttatgccaccatattggggcctggggttccacttgtgccgctggggatattcatccaccgccattacacgacaagttgttgagaatatgaccagggcacattttcctctggatgtacagtggaacgacctggactacatggatagtcgccgcgacttcaccttcaataaggatgggttcagagactttcctgctatggtccaagaacttcaccagggaggcaggaggtacatgatgatcgtagatccgggaatttcttcttctggcccagccggttcatacagaccgtatgacgaaggactgcgacgaggcgtctttatcacgaacgagactggtcagcctttgataggcaaggtttggccagggtccaccgctttcccggatttcacaaatcctaatgcactggcctggtgggaagatatggtcgccgagtttcacgaccaggtcccatttgacgggatgtggatcgacatgaacgagccatccaacttcattagaggaagtgtggatggctgtccgaataatgagctggaaaaccctccttacgtaccaggcgttgttggtgggactcttcaagctgcgacgatttgcgcatcctcccatcagttcctgtcaacccactataacttgcacaatctgtacgggacaacagaggctatcgccagtcatagggccctggtaaaagctagaggaacacgccctttcgttatctctcgctcaacttttgcaggccacggtaggtatgccggacattggaccggcgacgtctggagttcttgggaacagctggcttcctccgttccagagatattgcagtttaacctgttgggagtcccacttgtaggtgcagatgtttgtggcttcctggggaacacctcagaagaattgtgcgtaagatggactcaactgggcgccttctacccttttatgcgcaatcacaactcactgacatctttgcctcaagaaccgtactcatttagtgagccagcacagcaggccatgaggaaggctcttggcctgagatatgcacttctgccgcatctgtacacccttttccaccaggctcatgtccatggagagactgttgcacgacctctgttcttggagttcccaaaagactcttccacgtggacagtcgatcaccagatgctgtggggcgaggctctgctgattacacctgtattgcaacctggtaaggccgaagttaccgggtactttccattggggacctggtatgatctgcaaacagtcccggttgaagctcttggaagtcttccacctccacctgctgcaccaagggagcctgcgatccactctgaaggacagtgggtaactttgcctgcaccgctggacaccatcaatgtccatctgcgcgaaggctacatcataccacttcaaggtcctggactgaccactacagagtctagaaaacaaccaatggctcttgctgttgcactgactaaaagcggcgaagcaaggggtgagctgttctgggacgacggagagtcactggaggtactcgaacgaggcgcgtatacgcaggtcatttttgaggctcgcaataatacgatcgttaacgagctggtccacgtcacttcagaaggtgcaggccttcagttgggcaaggtaactgtcctgggagttgctacagcaccgcagcaggtcttgtccaacggacggcccgtaagcaactttacctatagtcctgataccaaagttctggacatctgcgttgctctgctgatgggtgagcagttcctggtatcatggtgc

SEQ ID NO: 348 - protein, 944 aa, synthetic construct
  REGION 1..944: note = Variant of the Homo Sapiens Lysosomal alpha-glucosidase
MEWSWVFLFFLSVTTGVHSGHILWHDFSTVPRELSGSSQVLEETHPAHQVGASRPGPRDAQLHPGRPRAVPTQCDVPENSRFDCAPEKAITQEQCEARGCCYIPAKQGLQGAQMGQPWCFFPPSYPSYKLENLSQSEMGYTATLTRTTPSFFPKDILTLRLDVMMETENRLHFTIKDPANRRYEVPLETPHVHSRAPSPLYSVEFSEEPFGVIVRRQLDGRVLLNTTVAPLFFADQFLQLSTSLPSQYITGLAEHLSPLMLSTSWNKITLWNRDLAPTPGANLYGSHPFYLALEDGGSAHGVFLLNSNAMDVVLQPSPALSWRSTGGILDVYIFLGPEPKSVVQQYLDVVGYPFMPPYWGLGFHLCRWGYSSTAITRQVVENMTRAHFPLDVQWNDLDYMDSRRDFTFNKDGFRDFPAMVQELHQGGRRYMMIVDPGISSSGPAGSYRPYDEGLRRGVFITNETGQPLIGKVWPGSTAFPDFTNPNALAWWEDMVAEFHDQVPFDGMWIDMNEPSNFIRGSVDGCPNNELENPPYVPGVVGGTLQAATICASSHQFLSTHYNLHNLYGTTEAIASHRALVKARGTRPFVISRSTFAGHGRYAGHWTGDVWSSWEQLASSVPEILQFNLLGVPLVGADVCGFLGNTSEELCVRWTQLGAFYPFMRNHNSLTSLPQEPYSFSEPAQQAMRKALGLRYALLPHLYTLFHQAHVHGETVARPLFLEFPKDSSTWTVDHQMLWGEALLITPVLQPGKAEVTGYFPLGTWYDLQTVPVEALGSLPPPPAAPREPAIHSEGQWVTLPAPLDTINVHLREGYIIPLQGPGLTTTESRKQPMALAVALTKSGEARGELFWDDGESLEVLERGAYTQVIFEARNNTIVNELVHVTSEGAGLQLGKVTVLGVATAPQQVLSNGRPVSNFTYSPDTKVLDICVALLMGEQFLVSWC

SEQ ID NO: 349 - DNA, 2832 bp, synthetic construct
  misc_feature 1..2832: note = Variant of the Homo Sapiens Lysosomal alpha-glucosidase
  source 1..2832: mol_type = other DNA
atggaatggagctgggtctttctcttcttcctgtcagtaacgactggtgtccactccggacacattctgtggcatgatttttctaccgtgcctagagagctttccggttcaagtcaagtcctcgaagaaacacatccagcccatcaggttggcgcatctaggccgggccctcgggacgctcaactccacccagggagacctagggccgttcccactcagtgcgacgtgccagagaactcacgcttcgattgtgcacctgagaaggctatcacgcaagagcagtgcgaggcccgcggatgttgttacataccggctaaacaggggctgcagggtgcgcagatgggccaaccttggtgcttcttcccaccatcctatccgagttacaagctggagaatctctcccagtctgaaatgggatataccgcaacactgactcggaccaccccctccttctttcccaaagatatcttgactctgagacttgacgtaatgatggagacagaaaacaggctccactttaccattaaggaccctgccaatcgccgatacgaggtgcctctggaaacaccacacgtgcacagtagagctccatcacctctgtattctgtcgagttctccgaagagccgtttggcgttatcgtcaggaggcagctcgacgggcgagtgcttctgaacacgactgtggccccgttgttctttgcggatcagtttctgcaactgtcaacaagtctcccttctcagtacattaccgggcttgcagagcatctgtccccactcatgctgagtacttcatggaacaaaatcacactgtggaatagagaccttgctcctactccaggagccaacttgtatggttctcaccctttctacttggccctggaagatggcggatcagcgcatggcgtattcctcctgaattccaacgcaatggacgttgttcttcagccatctcctgctttgagttggagatctacaggcgggatactggacgtctacatctttctgggtccagagcctaaatccgtagtgcagcagtatcttgatgtcgtcggatacccgtttatgccaccatattggggcctggggttccacttgtgccgctggggatattcatccaccgccattacacgacaagttgttgagaatatgaccagggcacattttcctctggatgtacagtggaacgacctggactacatggatagtcgccgcgacttcaccttcaataaggatgggttcagagactttcctgctatggtccaagaacttcaccagggaggcaggaggtacatgatgatcgtagatccgggaatttcttcttctggcccagccggttcatacagaccgtatgacgaaggactgcgacgaggcgtctttatcacgaacgagactggtcagcctttgataggcaaggtttggccagggtccaccgctttcccggatttcacaaatcctgaggcactggcctggtgggaagatatggtcgccgagtttcacgaccaggtcccatttgacgggatgtggatcgacatgaacgagccatccaacttcattagaggaagtgtggatggctgtccgaataatgagctggaaaaccctccttacgtaccaggcgttgttggtgggactcttcaagctgcgacgatttgcgcatcctcccatcagttcctgtcaacccactataacttgcacaatctgtacgggacaacagaggctatcgccagtcatagggccctggtaaaagctagaggaacacgccctttcgttatctctcgctcaacttttgcaggccacggtaggtatgccggacattggaccggcgacgtctggagttcttgggaacagctggcttcctccgttccagagatattgcagtttaacctgttgggagtcccacttgtaggtgcagatgtttgtggcttcctggggaacacctcagaagaattgtgcgtaagatggactcaactgggcgccttctacccttttatgcgcaatcacaactcactgacatctttgcctcaagaaccgtactcatttagtgagccagcacagcaggccatgaggaaggctcttggcctgagatatgcacttctgccgcatctgtacacccttttccaccaggctcatgtccatggagagactgttgcacgacctctgttcttggagttcccaaaagactcttccacgtggacagtcgatcaccagatgctgtggggcgaggctctgctgattacacctgtattgcaacctggtaaggccgaagttaccgggtactttccattggggacctggtatgatctgcaaacagtcccggttgaagctcttggaagtcttccacctccacctgctgcaccaagggagcctgcgatccactctgaaggacagtgggtaactttgcctgcaccgctggacaccatcaatgtccatctgcgcgaaggctacatcataccacttcaaggtcctggactgaccactacagagtctagaaaacaaccaatggctcttgctgttgcactgactaaaagcggcgaagcaaggggtgagctgttctgggacgacggagagtcactggaggtactcgaacgaggcgcgtatacgcaggtcatttttgaggctcgcaataatacgatcgttaacgagctggtccacgtcacttcagaaggtgcaggccttcagttggttaaggtaactgtcctgggagttgctacagcaccgcagcaggtcttgtccaacggacggcccgtaagcaactttacctatagtcctgataccaaagttctggacatctgcgttgctctgctgatgggtgagcagttcctggtatcatggtgc

SEQ ID NO: 350 - protein, 944 aa, synthetic construct
  REGION 1..944: note = Variant of the Homo Sapiens Lysosomal alpha-glucosidase
MEWSWVFLFFLSVTTGVHSGHILWHDFSTVPRELSGSSQVLEETHPAHQVGASRPGPRDAQLHPGRPRAVPTQCDVPENSRFDCAPEKAITQEQCEARGCCYIPAKQGLQGAQMGQPWCFFPPSYPSYKLENLSQSEMGYTATLTRTTPSFFPKDILTLRLDVMMETENRLHFTIKDPANRRYEVPLETPHVHSRAPSPLYSVEFSEEPFGVIVRRQLDGRVLLNTTVAPLFFADQFLQLSTSLPSQYITGLAEHLSPLMLSTSWNKITLWNRDLAPTPGANLYGSHPFYLALEDGGSAHGVFLLNSNAMDVVLQPSPALSWRSTGGILDVYIFLGPEPKSVVQQYLDVVGYPFMPPYWGLGFHLCRWGYSSTAITRQVVENMTRAHFPLDVQWNDLDYMDSRRDFTFNKDGFRDFPAMVQELHQGGRRYMMIVDPGISSSGPAGSYRPYDEGLRRGVFITNETGQPLIGKVWPGSTAFPDFTNPEALAWWEDMVAEFHDQVPFDGMWIDMNEPSNFIRGSVDGCPNNELENPPYVPGVVGGTLQAATICASSHQFLSTHYNLHNLYGTTEAIASHRALVKARGTRPFVISRSTFAGHGRYAGHWTGDVWSSWEQLASSVPEILQFNLLGVPLVGADVCGFLGNTSEELCVRWTQLGAFYPFMRNHNSLTSLPQEPYSFSEPAQQAMRKALGLRYALLPHLYTLFHQAHVHGETVARPLFLEFPKDSSTWTVDHQMLWGEALLITPVLQPGKAEVTGYFPLGTWYDLQTVPVEALGSLPPPPAAPREPAIHSEGQWVTLPAPLDTINVHLREGYIIPLQGPGLTTTESRKQPMALAVALTKSGEARGELFWDDGESLEVLERGAYTQVIFEARNNTIVNELVHVTSEGAGLQLVKVTVLGVATAPQQVLSNGRPVSNFTYSPDTKVLDICVALLMGEQFLVSWC

SEQ ID NO: 351 - DNA, 2832 bp, synthetic construct
  misc_feature 1..2832: note = Variant of the Homo Sapiens Lysosomal alpha-glucosidase
  source 1..2832: mol_type = other DNA
atggaatggagctgggtctttctcttcttcctgtcagtaacgactggtgtccactccggacacattctgtggcatgatttttctaccgtgcctagagagctttccggttcaagtcaagtcctcgaagaaacacatccagcccatcaggttggcgcatctaggccgggccctcgggacgctcaactccacccagggagacctagggccgttcccactcagtgcgacgtgccagagaactcacgcttcgattgtgcacctgagaaggctatcacgcaagagcagtgcgaggcccgcggatgttgttacataccggctaaacaggggctgcagggtgcgcagatgggccaaccttggtgcttcttcccaccatcctatccgagttacaagctggagaatctctcccagtctgaaatgggatataccgcaacactgactcggaccaccccctccttctttcccaaagatatcttgactctgagacttgacgtaatgatggagacagaaaacaggctccactttaccattaaggaccctgccaatcgccgatacgaggtgcctctggaaacaccacacgtgcacagtagagctccatcacctctgtattctgtcgagttctccgaagagccgtttggcgttatcgtcaggaggcagctcgacgggcgagtgcttctgaacacgactgtggccccgttgttctttgcggatcagtttctgcaactgtcaacaagtctcccttctcagtacattaccgggcttgcagagcatctgtccccactcatgctgagtacttcatggaacaaaatcacactgtggaatagagaccttgctcctactccaggagccaacttgtatggttctcaccctttctacttggccctggaagatggcggatcagcgcatggcgtattcctcctgaattccaacgcaatggacgttgttcttcagccatctcctgctttgagttggagatctacaggcgggatactggacgtctacatctttctgggtccagagcctaaatccgtagtgcagcagtatcttgatgtcgtcggatacccgtttatgccaccatattggggcctggggttccacttgtgccgctggggatattcatccaccgccattacacgacaagttgttgagaatatgaccagggcacattttcctctggatgtacagtggaacgacctggactacatggatagtcgccgcgacttcaccttcaataaggatgggttcagagactttcctgctatggtccaagaacttcaccagggaggcaggaggtacatgatgatcgtagatccgggaatttcttcttctggcccagccggttcatacagaccgtatgacgaaggactgcgacgaggcgtctttatcacgaacgagactggtcagcctttgataggcaaggtttggccagggtccaccgctttcccggatttcacaaatcctgaggcactggcctggtgggaagatatggtcgccgagtttcacgaccaggtcccatttgacgggatgtggatcgacatgaacgagccatccaacttcattagaggaagtgtggatggctgtccgaataatgagctggaaaaccctccttacgtaccaggcgttgttggtgggactcttcaagctgcgacgatttgcgcatcctcccatcagttcctgtcaacccactataacttgcacaatctgtacgggacaacagaggctatcgccagtcatagggccctggtaaaagctagaggaacacgccctttcgttatctctcgctcaacttttgcaggccacggtaggtatgccggacattggaccggcgacgtctggagttcttgggaacagctggcttcctccgttccagagatattgcagtttaacctgttgggagtcccacttgtaggtgcagatgtttgtggcttcctggggaacacctcagaagaattgtgcgtaagatggactcaactgggcgccttctacccttttatgcgcaatcacaactcactgacatctttgcctcaagaaccgtactcatttagtgagccagcacagcaggccatgaggaaggctcttggcctgagatatgcacttctgccgcatctgtacacccttttccaccaggctcatgtccatggagagactgttgcacgacctctgttcttggagttcccaaaagactcttccacgtggacagtcgatcaccagatgctgtggggcgaggctctgctgattacacctgtattgcaacctggtaaggccgaagttaccgggtactttccattggggacctggtatgatctgcaaacagtcccggttgaagctcttggaagtcttccacctccacctgctgcaccaagggagcctgcgatccactctgaaggacagtgggtaactttgcctgcaccgctggacaccatcaatgtccatctgcgcgaaggctacatcataccacttcaaggtcctggactgaccactacagagtctagagatcaaccaatggctcttgctgttgcactgactaaaagcggcgaagcaaggggtgagctgttctgggacgacggagagtcactggaggtactcgaacgaggcgcgtatacgcaggtcatttttgaggctcgcaataatacgatcgttaacgagctggtccacgtcacttcagaaggtgcaggccttcagttgggcaaggtaactgtcctgggagttgctacagcaccgcagcaggtcttgtccaacggacggcccgtaagcaactttacctatagtcctgataccaaagttctggacatctgcgttgctctgctgatgggtgagcagttcctggtatcatggtgc

SEQ ID NO: 352 - protein, 944 aa, synthetic construct
  REGION 1..944: note = Variant of the Homo Sapiens Lysosomal alpha-glucosidase
MEWSWVFLFFLSVTTGVHSGHILWHDFSTVPRELSGSSQVLEETHPAHQVGASRPGPRDAQLHPGRPRAVPTQCDVPENSRFDCAPEKAITQEQCEARGCCYIPAKQGLQGAQMGQPWCFFPPSYPSYKLENLSQSEMGYTATLTRTTPSFFPKDILTLRLDVMMETENRLHFTIKDPANRRYEVPLETPHVHSRAPSPLYSVEFSEEPFGVIVRRQLDGRVLLNTTVAPLFFADQFLQLSTSLPSQYITGLAEHLSPLMLSTSWNKITLWNRDLAPTPGANLYGSHPFYLALEDGGSAHGVFLLNSNAMDVVLQPSPALSWRSTGGILDVYIFLGPEPKSVVQQYLDVVGYPFMPPYWGLGFHLCRWGYSSTAITRQVVENMTRAHFPLDVQWNDLDYMDSRRDFTFNKDGFRDFPAMVQELHQGGRRYMMIVDPGISSSGPAGSYRPYDEGLRRGVFITNETGQPLIGKVWPGSTAFPDFTNPEALAWWEDMVAEFHDQVPFDGMWIDMNEPSNFIRGSVDGCPNNELENPPYVPGVVGGTLQAATICASSHQFLSTHYNLHNLYGTTEAIASHRALVKARGTRPFVISRSTFAGHGRYAGHWTGDVWSSWEQLASSVPEILQFNLLGVPLVGADVCGFLGNTSEELCVRWTQLGAFYPFMRNHNSLTSLPQEPYSFSEPAQQAMRKALGLRYALLPHLYTLFHQAHVHGETVARPLFLEFPKDSSTWTVDHQMLWGEALLITPVLQPGKAEVTGYFPLGTWYDLQTVPVEALGSLPPPPAAPREPAIHSEGQWVTLPAPLDTINVHLREGYIIPLQGPGLTTTESRDQPMALAVALTKSGEARGELFWDDGESLEVLERGAYTQVIFEARNNTIVNELVHVTSEGAGLQLGKVTVLGVATAPQQVLSNGRPVSNFTYSPDTKVLDICVALLMGEQFLVSWC

SEQ ID NO: 353 - DNA, 2832 bp, synthetic construct
  misc_feature 1..2832: note = Variant of the Homo Sapiens Lysosomal alpha-glucosidase
  source 1..2832: mol_type = other DNA
atggaatggagctgggtctttctcttcttcctgtcagtaacgactggtgtccactccggacacattctgtggcatgatttttctaccgtgcctagagagctttccggttcaagtcaagtcctcgaagaaacacatccagcccatcaggttggcgcatctaggccgggccctcgggacgctcaactccacccagggagacctagggccgttcccactcagtgcgacgtgccagagaactcacgcttcgattgtgcacctgagaaggctatcacgcaagagcagtgcgaggcccgcggatgttgttacataccggctaaacaggggctgcagggtgcgcagatgggccaaccttggtgcttcttcccaccatcctatccgagttacaagctggagaatctctcccagtctgaaatgggatataccgcaacactgactcggaccaccccctccttctttcccaaagatatcttgactctgagacttgacgtaatgatggagacagaaaacaggctccactttaccattaaggaccctgccaatcgccgatacgaggtgcctctggaaacaccacacgtgcacagtagagctccatcacctctgtattctgtcgagttctccgaagagccgtttggcgttatcgtcaggaggcagctcgacgggcgagtgcttctgaacacgactgtggccccgttgttctttgcggatcagtttctgcaactgtcaacaagtctcccttctcagtacattaccgggcttgcagagcatctgtccccactcatgctgagtacttcatggaacaaaatcacactgtggaatagagaccttgctcctactccaggagccaacttgtatggttctcaccctttctacttggccctggaagatggcggatcagcgcatggcgtattcctcctgaattccaacgcaatggacgttgttcttcagccatctcctgctttgagttggagatctacaggcgggatactggacgtctacatctttctgggtccagagcctaaatccgtagtgcagcagtatcttgatgtcgtcggatacccgtttatgccaccatattggggcctggggttccacttgtgccgctggggatattcatccaccgccattacacgacaagttgttgagaatatgaccagggcacattttcctctggatgtacagtggaacgacctggactacatggatagtcgccgcgacttcaccttcaataaggatgggttcagagactttcctgctatggtccaagaacttcaccagggaggcaggaggtacatgatgatcgtagatccgggaatttcttcttctggcccagccggttcatacagaccgtatgacgaaggactgcgacgaggcgtctttatcacgaacgagactggtcagcctttgataggcaaggtttggccagggtccaccgctttcccggatttcacaaatcctgaggcactggcctggtgggaagatatggtcgccgagtttcacgaccaggtcccatttgacgggatgtggatcgacatgaacgagccatccaacttcattagaggaagtgtggatggctgtccgaataatgagctggaaaaccctccttacgtaccaggcgttgttggtgggactcttcaagctgcgacgatttgcgcatcctcccatcagttcctgtcaacccactataacttgcacaatctgtacgggacaacagaggctatcgccagtcatagggccctggtaaaagctagaggaacacgccctttcgttatctctcgctcaacttttgcaggccacggtaggtatgccggacattggaccggcgacgtctggagttcttgggaacagctggcttcctccgttccagagatattgcagtttaacctgttgggagtcccacttgtaggtgcagatgtttgtggcttcctggggaacacctcagaagaattgtgcgtaagatggactcaactgggcgccttctacccttttatgcgcaatcacaactcactgacatctttgcctcaagaaccgtactcatttagtgagccagcacagcaggccatgaggaaggctcttggcctgagatatgcacttctgccgcatctgtacacccttttccaccaggctcatgtccatggagagactgttgcacgacctctgttcttggagttcccaaaagactcttccacgtggacagtcgatcaccagatgctgtggggcgaggctctgctgattacacctgtattgcaacctggtaaggccgaagttaccgggtactttccattggggacctggtatgatctgcaaacagtcccggttgaagctcttggaagtcttccacctccacctgctgcaccaagggagcctgcgatccactctgaaggacagtgggtaactttgcctgcaccgctggacaccatcaatgtccatctgcgcgaaggctacatcataccacttcaaggtcctggactgaccactacagagtctagaaaacaaccaatggctcttgctgttgcactgactaaaagcggcgaagcaaggggtgagctgttctgggacgacggagagtcactggaggtactcgaacgaggcgcgtatacgcaggtcatttttgaggctcgcaataatacgatcgttaacgagctggtccacgtcacttcagaaggtgcaggccttcagttgtggaaggtaactgtcctgggagttgctacagcaccgcagcaggtcttgtccaacggacggcccgtaagcaactttacctatagtcctgataccaaagttctggacatctgcgttgctctgctgatgggtgagcagttcctggtatcatggtgc

SEQ ID NO: 354 - protein, 944 aa, synthetic construct
  REGION 1..944: note = Variant of the Homo Sapiens Lysosomal alpha-glucosidase
MEWSWVFLFFLSVTTGVHSGHILWHDFSTVPRELSGSSQVLEETHPAHQVGASRPGPRDAQLHPGRPRAVPTQCDVPENSRFDCAPEKAITQEQCEARGCCYIPAKQGLQGAQMGQPWCFFPPSYPSYKLENLSQSEMGYTATLTRTTPSFFPKDILTLRLDVMMETENRLHFTIKDPANRRYEVPLETPHVHSRAPSPLYSVEFSEEPFGVIVRRQLDGRVLLNTTVAPLFFADQFLQLSTSLPSQYITGLAEHLSPLMLSTSWNKITLWNRDLAPTPGANLYGSHPFYLALEDGGSAHGVFLLNSNAMDVVLQPSPALSWRSTGGILDVYIFLGPEPKSVVQQYLDVVGYPFMPPYWGLGFHLCRWGYSSTAITRQVVENMTRAHFPLDVQWNDLDYMDSRRDFTFNKDGFRDFPAMVQELHQGGRRYMMIVDPGISSSGPAGSYRPYDEGLRRGVFITNETGQPLIGKVWPGSTAFPDFTNPEALAWWEDMVAEFHDQVPFDGMWIDMNEPSNFIRGSVDGCPNNELENPPYVPGVVGGTLQAATICASSHQFLSTHYNLHNLYGTTEAIASHRALVKARGTRPFVISRSTFAGHGRYAGHWTGDVWSSWEQLASSVPEILQFNLLGVPLVGADVCGFLGNTSEELCVRWTQLGAFYPFMRNHNSLTSLPQEPYSFSEPAQQAMRKALGLRYALLPHLYTLFHQAHVHGETVARPLFLEFPKDSSTWTVDHQMLWGEALLITPVLQPGKAEVTGYFPLGTWYDLQTVPVEALGSLPPPPAAPREPAIHSEGQWVTLPAPLDTINVHLREGYIIPLQGPGLTTTESRKQPMALAVALTKSGEARGELFWDDGESLEVLERGAYTQVIFEARNNTIVNELVHVTSEGAGLQLWKVTVLGVATAPQQVLSNGRPVSNFTYSPDTKVLDICVALLMGEQFLVSWC

SEQ ID NO: 355 - DNA, 2832 bp, synthetic construct
  misc_feature 1..2832: note = Variant of the Homo Sapiens Lysosomal alpha-glucosidase
  source 1..2832: mol_type = other DNA
atggaatggagctgggtctttctcttcttcctgtcagtaacgactggtgtccactccggacacattctgtggcatgatttttctaccgtgcctagagagctttccggttcaagtcaagtcctcgaagaaacacatccagcccatcaggttggcgcatctaggccgggccctcgggacgctcaactccacccagggagacctagggccgttcccactcagtgcgacgtgccagttaactcacgcttcgattgtgcacctgagaaggctatcacgcaagagcagtgcgaggcccgcggatgttgttacataccggctaaacaggggctgcagggtgcgcagatgggccaaccttggtgcttcttcccaccatcctatccgagttacaagctggagaatctctcccagtctgaaatgggatataccgcaacactgactcggaccaccccctccttctttcccaaagatatcttgactctgagacttgacgtaatgatggagacagaaaacaggctccactttaccattaaggaccctgccaatcgccgatacgaggtgcctctggaaacaccacacgtgcacagtagagctccatcacctctgtattctgtcgagttctccgaagagccgtttggcgttatcgtcaggaggcagctcgacgggcgagtgcttctgaacacgactgtggccccgttgttctttgcggatcagtttctgcaactgtcaacaagtctcccttctcagtacattaccgggcttgcagagcatctgtccccactcatgctgagtacttcatggaacaaaatcacactgtggaatagagaccttgctcctactccaggagccaacttgtatggttctcaccctttctacttggccctggaagatggcggatcagcgcatggcgtattcctcctgaattccaacgcaatggacgttgttcttcagccatctcctgctttgagttggagatctacaggcgggatactggacgtctacatctttctgggtccagagcctaaatccgtagtgcagcagtatcttgatgtcgtcggatacccgtttatgccaccatattggggcctggggttccacttgtgccgctggggatattcatccaccgccattacacgacaagttgttgagaatatgaccagggcacattttcctctggatgtacagtggaacgacctggactacatggatagtcgccgcgacttcaccttcaataaggatgggttcagagactttcctgctatggtccaagaacttcaccagggaggcaggaggtacatgatgatcgtagatccgggaatttcttcttctggcccagccggttcatacagaccgtatgacgaaggactgcgacgaggcgtctttatcacgaacgagactggtcagcctttgataggcaaggtttggccagggtccaccgctttcccggatttcacaaatcctgaggcactggcctggtgggaagatatggtcgccgagtttcacgaccaggtcccatttgacgggatgtggatcgacatgaacgagccatccaacttcattagaggaagtgtggatggctgtccgaataatgagctggaaaaccctccttacgtaccaggcgttgttggtgggactcttcaagctgcgacgatttgcgcatcctcccatcagttcctgtcaacccactataacttgcacaatctgtacgggacaacagaggctatcgccagtcatagggccctggtaaaagctagaggaacacgccctttcgttatctctcgctcaacttttgcaggccacggtaggtatgccggacattggaccggcgacgtctggagttcttgggaacagctggcttcctccgttccagagatattgcagtttaacctgttgggagtcccacttgtaggtgcagatgtttgtggcttcctggggaacacctcagaagaattgtgcgtaagatggactcaactgggcgccttctacccttttatgcgcaatcacaactcactgacatctttgcctcaagaaccgtactcatttagtgagccagcacagcaggccatgaggaaggctcttggcctgagatatgcacttctgccgcatctgtacacccttttccaccaggctcatgtccatggagagactgttgcacgacctctgttcttggagttcccaaaagactcttccacgtggacagtcgatcaccagatgctgtggggcgaggctctgctgattacacctgtattgcaacctggtaaggccgaagttaccgggtactttccattggggacctggtatgatctgcaaacagtcccggttgaagctcttggaagtcttccacctccacctgctgcaccaagggagcctgcgatccactctgaaggacagtgggtaactttgcctgcaccgctggacaccatcaatgtccatctgcgcgaaggctacatcataccacttcaaggtcctggactgaccactacagagtctagaaaacaaccaatggctcttgctgttgcactgactaaaagcggcgaagcaaggggtgagctgttctgggacgacggagagtcactggaggtactcgaacgaggcgcgtatacgcaggtcatttttgaggctcgcaataatacgatcgttaacgagctggtccacgtcacttcagaaggtgcaggccttcagttgggcaaggtaactgtcctgggagttgctacagcaccgcagcaggtcttgtccaacggacggcccgtaagcaactttacctatagtcctgataccaaagttctggacatctgcgttgctctgctgatgggtgagcagttcctggtatcatggtgc

SEQ ID NO: 356 - protein, 944 aa, synthetic construct
  REGION 1..944: note = Variant of the Homo Sapiens Lysosomal alpha-glucosidase
MEWSWVFLFFLSVTTGVHSGHILWHDFSTVPRELSGSSQVLEETHPAHQVGASRPGPRDAQLHPGRPRAVPTQCDVPVNSRFDCAPEKAITQEQCEARGCCYIPAKQGLQGAQMGQPWCFFPPSYPSYKLENLSQSEMGYTATLTRTTPSFFPKDILTLRLDVMMETENRLHFTIKDPANRRYEVPLETPHVHSRAPSPLYSVEFSEEPFGVIVRRQLDGRVLLNTTVAPLFFADQFLQLSTSLPSQYITGLAEHLSPLMLSTSWNKITLWNRDLAPTPGANLYGSHPFYLALEDGGSAHGVFLLNSNAMDVVLQPSPALSWRSTGGILDVYIFLGPEPKSVVQQYLDVVGYPFMPPYWGLGFHLCRWGYSSTAITRQVVENMTRAHFPLDVQWNDLDYMDSRRDFTFNKDGFRDFPAMVQELHQGGRRYMMIVDPGISSSGPAGSYRPYDEGLRRGVFITNETGQPLIGKVWPGSTAFPDFTNPEALAWWEDMVAEFHDQVPFDGMWIDMNEPSNFIRGSVDGCPNNELENPPYVPGVVGGTLQAATICASSHQFLSTHYNLHNLYGTTEAIASHRALVKARGTRPFVISRSTFAGHGRYAGHWTGDVWSSWEQLASSVPEILQFNLLGVPLVGADVCGFLGNTSEELCVRWTQLGAFYPFMRNHNSLTSLPQEPYSFSEPAQQAMRKALGLRYALLPHLYTLFHQAHVHGETVARPLFLEFPKDSSTWTVDHQMLWGEALLITPVLQPGKAEVTGYFPLGTWYDLQTVPVEALGSLPPPPAAPREPAIHSEGQWVTLPAPLDTINVHLREGYIIPLQGPGLTTTESRKQPMALAVALTKSGEARGELFWDDGESLEVLERGAYTQVIFEARNNTIVNELVHVTSEGAGLQLGKVTVLGVATAPQQVLSNGRPVSNFTYSPDTKVLDICVALLMGEQFLVSWC

SEQ ID NO: 357 - DNA, 2832 bp, synthetic construct
  misc_feature 1..2832: note = Variant of the Homo Sapiens Lysosomal alpha-glucosidase
  source 1..2832: mol_type = other DNA
atggaatggagctgggtctttctcttcttcctgtcagtaacgactggtgtccactccggacacattctgtggcatgatttttctaccgtgcctagagagctttccggttcaagtcaagtcctcgaagaaacacatccagcccatcaggttggcgcatctaggccgggccctcgggacgctcaactccacccagggagacctagggccgttcccactcagtgcgacgtgccagagaactcacgcttcgattgtgcacctgagaaggctatcacgcaagagcagtgcgaggcccgcggatgttgttacataccggctaaacaggggctgcagggtgcgcagatgggccaaccttggtgcttcttcccaccatcctatccgagttacaagctggagaatctctcccagtctgaaatgggatataccgcaacactgactcggaccaccccctccttctttcccaaagatatcttgactctgagacttgacgtaatgatggagacagaaaacaggctccactttaccattaaggaccctgccaatcgccgatacgaggtgcctctggaaacaccacacgtgcacagtagagctccatcacctctgtattctgtcgagttctccgaagagccgtttggcgttatcgtcaggaggcagctcgacgggcgagtgcttctgaacacgactgtggccccgttgttctttgcggatcagtttctgcaactgtcaacaagtctcccttctcagtacattaccgggcttgcagagcatctgtccccactcatgctgagtacttcatggaacaaaatcacactgtggaatagagaccttgctcctactccaggagccaacttgtatggttctcaccctttctacttggccctggaagatggcggatcagcgcatggcgtattcctcctgaattccaacgcaatggacgttgttcttcagccatctcctgctttgagttggagatctacaggcgggatactggacgtctacatctttctgggtccagagcctaaatccgtagtgcagcagtatcttgatgtcgtcggatacccgtttatgccaccatattggggcctggggttccacttgtgccgctggggatattcatccaccgccattacacgacaagttgttgagaatatgaccagggcacattttcctctggatgtacagtggaacgacctggactacatggatagtcgccgcgacttcaccttcaataaggatgggttcagagactttcctgctatggtccaagaacttcaccagggaggcaggaggtacatgatgatcgtagatccgggaatttcttcttctggcccagccggttcatacagaccgtatgacgaaggactgcgacgaggcgtctttatcacgaacgagactggtcagcctttgataggcaaggtttggccagggtccaccgctttcccggatttcacaaatcctgaggcactggcctggtgggaagatatggtcgccgagtttcacgaccaggtcccatttgacgggatgtggatcgacatgaacgagccatccaacttcattagaggaagtgcggatggctgtccgaataatgagctggaaaaccctccttacgtaccaggcgttgttggtgggactcttcaagctgcgacgatttgcgcatcctcccatcagttcctgtcaacccactataacttgcacaatctgtacgggacaacagaggctatcgccagtcatagggccctggtaaaagctagaggaacacgccctttcgttatctctcgctcaacttttgcaggccacggtaggtatgccggacattggaccggcgacgtctggagttcttgggaacagctggcttcctccgttccagagatattgcagtttaacctgttgggagtcccacttgtaggtgcagatgtttgtggcttcctggggaacacctcagaagaattgtgcgtaagatggactcaactgggcgccttctacccttttatgcgcaatcacaactcactgacatctttgcctcaagaaccgtactcatttagtgagccagcacagcaggccatgaggaaggctcttggcctgagatatgcacttctgccgcatctgtacacccttttccaccaggctcatgtccatggagagactgttgcacgacctctgttcttggagttcccaaaagactcttccacgtggacagtcgatcaccagatgctgtggggcgaggctctgctgattacacctgtattgcaacctggtaaggccgaagttaccgggtactttccattggggacctggtatgatctgcaaacagtcccggttgaagctcttggaagtcttccacctccacctgctgcaccaagggagcctgcgatccactctgaaggacagtgggtaactttgcctgcaccgctggacaccatcaatgtccatctgcgcgaaggctacatcataccacttcaaggtcctggactgaccactacagagtctagaaaacaaccaatggctcttgctgttgcactgactaaaagcggcgaagcaaggggtgagctgttctgggacgacggagagtcactggaggtactcgaacgaggcgcgtatacgcaggtcatttttgaggctcgcaataatacgatcgttaacgagctggtccacgtcacttcagaaggtgcaggccttcagttgggcaaggtaactgtcctgggagttgctacagcaccgcagcaggtcttgtccaacggacggcccgtaagcaactttacctatagtcctgataccaaagttctggacatctgcgttgctctgctgatgggtgagcagttcctggtatcatggtgc

SEQ ID NO: 358 - protein, 944 aa, synthetic construct
  REGION 1..944: note = Variant of the Homo Sapiens Lysosomal alpha-glucosidase
MEWSWVFLFFLSVTTGVHSGHILWHDFSTVPRELSGSSQVLEETHPAHQVGASRPGPRDAQLHPGRPRAVPTQCDVPENSRFDCAPEKAITQEQCEARGCCYIPAKQGLQGAQMGQPWCFFPPSYPSYKLENLSQSEMGYTATLTRTTPSFFPKDILTLRLDVMMETENRLHFTIKDPANRRYEVPLETPHVHSRAPSPLYSVEFSEEPFGVIVRRQLDGRVLLNTTVAPLFFADQFLQLSTSLPSQYITGLAEHLSPLMLSTSWNKITLWNRDLAPTPGANLYGSHPFYLALEDGGSAHGVFLLNSNAMDVVLQPSPALSWRSTGGILDVYIFLGPEPKSVVQQYLDVVGYPFMPPYWGLGFHLCRWGYSSTAITRQVVENMTRAHFPLDVQWNDLDYMDSRRDFTFNKDGFRDFPAMVQELHQGGRRYMMIVDPGISSSGPAGSYRPYDEGLRRGVFITNETGQPLIGKVWPGSTAFPDFTNPEALAWWEDMVAEFHDQVPFDGMWIDMNEPSNFIRGSADGCPNNELENPPYVPGVVGGTLQAATICASSHQFLSTHYNLHNLYGTTEAIASHRALVKARGTRPFVISRSTFAGHGRYAGHWTGDVWSSWEQLASSVPEILQFNLLGVPLVGADVCGFLGNTSEELCVRWTQLGAFYPFMRNHNSLTSLPQEPYSFSEPAQQAMRKALGLRYALLPHLYTLFHQAHVHGETVARPLFLEFPKDSSTWTVDHQMLWGEALLITPVLQPGKAEVTGYFPLGTWYDLQTVPVEALGSLPPPPAAPREPAIHSEGQWVTLPAPLDTINVHLREGYIIPLQGPGLTTTESRKQPMALAVALTKSGEARGELFWDDGESLEVLERGAYTQVIFEARNNTIVNELVHVTSEGAGLQLGKVTVLGVATAPQQVLSNGRPVSNFTYSPDTKVLDICVALLMGEQFLVSWC

SEQ ID NO: 359 - DNA, 2832 bp, synthetic construct
  misc_feature 1..2832: note = Variant of the Homo Sapiens Lysosomal alpha-glucosidase
  source 1..2832: mol_type = other DNA
atggaatggagctgggtctttctcttcttcctgtcagtaacgactggtgtccactccggacacattctgtggcatgatttttctaccgtgcctagagagctttccggttcaagtcaagtcctcgaagaaacacatccagcccatcaggttggcgcatctaggccgggccctcgggacgctcaactccacccagggagacctagggccgttcccactcagtgcgacgtgccagagaactcacgcttcgattgtgcacctgagaaggctatcacgcaagagcagtgcgaggcccgcggatgttgttacataccggctaaacaggggctgcagggtgcgcagatgggccaaccttggtgcttcttcccaccatcctatccgagttacaagctggagaatctctcccagtctgaaatgggatataccgcaacactgactcggaccaccccctccttctttcccaaagatatcttgactctgagacttgacgtaatgatggagacagaaaacaggctccactttaccattaaggaccctgccaatcgccgatacgaggtgcctctggaaacaccacacgtgcacagtagagctccatcacctctgtattctgtcgagttctccgaagagccgtttggcgttatcgtcaggaggcagctcgacgggcgagtgcttctgaacacgactgtggccccgttgttctttgcggatcagtttctgcaactgtcaacaagtctcccttctcagtacattaccgggcttgcagagcatctgtccccactcatgctgagtacttcatggaacaaaatcacactgtggaatagagaccttgctcctactccaggagccaacttgtatggttctcaccctttctacttggccctggaagatggcggatcagcgcatggcgtattcctcctgaattccaacgcaatggacgttgttcttcagccatctcctgctttgagttggagatctacaggcgggatactggacgtctacatctttctgggtccagagcctaaatccgtagtgcagcagtatcttgatgtcgtcggatacccgtttatgccaccatattggggcctggggttccacttgtgccgctggggatattcatccaccgccattacacgacaagttgttgagaatatgaccagggcacattttcctctggatgtacagtggaacgacctggactacatggatagtcgccgcgacttcaccttcaataaggatgggttcagagactttcctgctatggtccaagaacttcaccagggaggcaggaggtacatgatgatcgtagatccgggaatttcttcttctggcccagccggttcatacagaccgtatgacgaaggactgcgacgaggcgtctttatcacgaacgagactggtcagcctttgataggcaaggtttggccagggtccaccgctttcccggatttcacaaatcctgaggcactggcctggtgggaagatatggtcgccgagtttcacgaccaggtcccatttgacgggatgtggatcgacatgaacgagccatccaacttcattagaggaagtgtggatggctgtccgaataatgagctggaaaaccctccttacgtaccaggcgttgttggtgggactcttcaagctgcgacgatttgcgcatcctcccatcagttcctgtcaacccactataacttgcacaatctgtacgggacaacagaggctatcgccagtcatagggccctggtaaaagctagaggaacacgccctttcgttatctctcgctcaacttttgcaggccacggtaggtatgccggacattggaccggcgacgtctggagttcttgggaacagctggcttcctccgttccagagatattgcagtttaacctgttgggagtcccacttgtaggtgcagatgtttgtggcttcctggggaacacctcagaagaattgtgcgtaagatggactcaactgggcgccttctacccttttatgcgcaatcacaactcactgatgtctttgcctcaagaaccgtactcatttagtgagccagcacagcaggccatgaggaaggctcttggcctgagatatgcacttctgccgcatctgtacacccttttccaccaggctcatgtccatggagagactgttgcacgacctctgttcttggagttcccaaaagactcttccacgtggacagtcgatcaccagatgctgtggggcgaggctctgctgattacacctgtattgcaacctggtaaggccgaagttaccgggtactttccattggggacctggtatgatctgcaaacagtcccggttgaagctcttggaagtcttccacctccacctgctgcaccaagggagcctgcgatccactctgaaggacagtgggtaactttgcctgcaccgctggacaccatcaatgtccatctgcgcgaaggctacatcataccacttcaaggtcctggactgaccactacagagtctagaaaacaaccaatggctcttgctgttgcactgactaaaagcggcgaagcaaggggtgagctgttctgggacgacggagagtcactggaggtactcgaacgaggcgcgtatacgcaggtcatttttgaggctcgcaataatacgatcgttaacgagctggtccacgtcacttcagaaggtgcaggccttcagttgggcaaggtaactgtcctgggagttgctacagcaccgcagcaggtcttgtccaacggacggcccgtaagcaactttacctatagtcctgataccaaagttctggacatctgcgttgctctgctgatgggtgagcagttcctggtatcatggtgc

SEQ ID NO: 360 - protein, 944 aa, synthetic construct
  REGION 1..944: note = Variant of the Homo Sapiens Lysosomal alpha-glucosidase
MEWSWVFLFFLSVTTGVHSGHILWHDFSTVPRELSGSSQVLEETHPAHQVGASRPGPRDAQLHPGRPRAVPTQCDVPENSRFDCAPEKAITQEQCEARGCCYIPAKQGLQGAQMGQPWCFFPPSYPSYKLENLSQSEMGYTATLTRTTPSFFPKDILTLRLDVMMETENRLHFTIKDPANRRYEVPLETPHVHSRAPSPLYSVEFSEEPFGVIVRRQLDGRVLLNTTVAPLFFADQFLQLSTSLPSQYITGLAEHLSPLMLSTSWNKITLWNRDLAPTPGANLYGSHPFYLALEDGGSAHGVFLLNSNAMDVVLQPSPALSWRSTGGILDVYIFLGPEPKSVVQQYLDVVGYPFMPPYWGLGFHLCRWGYSSTAITRQVVENMTRAHFPLDVQWNDLDYMDSRRDFTFNKDGFRDFPAMVQELHQGGRRYMMIVDPGISSSGPAGSYRPYDEGLRRGVFITNETGQPLIGKVWPGSTAFPDFTNPEALAWWEDMVAEFHDQVPFDGMWIDMNEPSNFIRGSVDGCPNNELENPPYVPGVVGGTLQAATICASSHQFLSTHYNLHNLYGTTEAIASHRALVKARGTRPFVISRSTFAGHGRYAGHWTGDVWSSWEQLASSVPEILQFNLLGVPLVGADVCGFLGNTSEELCVRWTQLGAFYPFMRNHNSLMSLPQEPYSFSEPAQQAMRKALGLRYALLPHLYTLFHQAHVHGETVARPLFLEFPKDSSTWTVDHQMLWGEALLITPVLQPGKAEVTGYFPLGTWYDLQTVPVEALGSLPPPPAAPREPAIHSEGQWVTLPAPLDTINVHLREGYIIPLQGPGLTTTESRKQPMALAVALTKSGEARGELFWDDGESLEVLERGAYTQVIFEARNNTIVNELVHVTSEGAGLQLGKVTVLGVATAPQQVLSNGRPVSNFTYSPDTKVLDICVALLMGEQFLVSWC

SEQ ID NO: 361 - DNA, 2832 bp, synthetic construct
  misc_feature 1..2832: note = Variant of the Homo Sapiens Lysosomal alpha-glucosidase
  source 1..2832: mol_type = other DNA
atggaatggagctgggtctttctcttcttcctgtcagtaacgactggtgtccactccggacacattctgtggcatgatttttctaccgtgcctagagagctttccggttcaagtcaagtcctcgaagaaacacatccagcccatcaggttggcgcatctaggccgggccctcgggacgctcaatatcacccagggagacctagggccgttcccactcagtgcgacgtgccagagaactcacgcttcgattgtgcacctgagaaggctatcacgcaagagcagtgcgaggcccgcggatgttgttacataccggctaaacaggggctgcagggtgcgcagatgggccaaccttggtgcttcttcccaccatcctatccgagttacaagctggagaatctctcccagtctgaaatgggatataccgcaacactgactcggaccaccccctccttctttcccaaagatatcttgactctgagacttgacgtaatgatggagacagaaaacaggctccactttaccattaaggaccctgccaatcgccgatacgaggtgcctctggaaacaccacacgtgcacagtagagctccatcacctctgtattctgtcgagttctccgaagagccgtttggcgttatcgtcaggaggcagctcgacgggcgagtgcttctgaacacgactgtggccccgttgttctttgcggatcagtttctgcaactgtcaacaagtctcccttctcagtacattaccgggcttgcagagcatctgtccccactcatgctgagtacttcatggaacaaaatcacactgtggaatagagaccttgctcctactccaggagccaacttgtatggttctcaccctttctacttggccctggaagatggcggatcagcgcatggcgtattcctcctgaattccaacgcaatggacgttgttcttcagccatctcctgctttgagttggagatctacaggcgggatactggacgtctacatctttctgggtccagagcctaaatccgtagtgcagcagtatcttgatgtcgtcggatacccgtttatgccaccatattggggcctggggttccacttgtgccgctggggatattcatccaccgccattacacgacaagttgttgagaatatgaccagggcacattttcctctggatgtacagtggaacgacctggactacatggatagtcgccgcgacttcaccttcaataaggatgggttcagagactttcctgctatggtccaagaacttcaccagggaggcaggaggtacatgatgatcgtagatccgggaatttcttcttctggcccagccggttcatacagaccgtatgacgaaggactgcgacgaggcgtctttatcacgaacgagactggtcagcctttgataggcaaggtttggccagggtccaccgctttcccggatttcacaaatcctgaggcactggcctggtgggaagatatggtcgccgagtttcacgaccaggtcccatttgacgggatgtggatcgacatgaacgagccatccaacttcattagaggaagtgtggatggctgtccgaataatgagctggaaaaccctccttacgtaccaggcgttgttggtgggactcttcaagctgcgacgatttgcgcatcctcccatcagttcctgtcaacccactataacttgcacaatctgtacgggacaacagaggctatcgccagtcatagggccctggtaaaagctagaggaacacgccctttcgttatctctcgctcaacttttgcaggccacggtaggtatgccggacattggaccggcgacgtctggagttcttgggaacagctggcttcctccgttccagagatattgcagtttaacctgttgggagtcccacttgtaggtgcagatgtttgtggcttcctggggaacacctcagaagaattgtgcgtaagatggactcaactgggcgccttctacccttttatgcgcaatcacaactcactgacatctttgcctcaagaaccgtactcatttagtgagccagcacagcaggccatgaggaaggctcttggcctgagatatgcacttctgccgcatctgtacacccttttccaccaggctcatgtccatggagagactgttgcacgacctctgttcttggagttcccaaaagactcttccacgtggacagtcgatcaccagatgctgtggggcgaggctctgctgattacacctgtattgcaacctggtaaggccgaagttaccgggtactttccattggggacctggtatgatctgcaaacagtcccggttgaagctcttggaagtcttccacctccacctgctgcaccaagggagcctgcgatccactctgaaggacagtgggtaactttgcctgcaccgctggacaccatcaatgtccatctgcgcgaaggctacatcataccacttcaaggtcctggactgaccactacagagtctagaaaacaaccaatggctcttgctgttgcactgactaaaagcggcgaagcaaggggtgagctgttctgggacgacggagagtcactggaggtactcgaacgaggcgcgtatacgcaggtcatttttgaggctcgcaataatacgatcgttaacgagctggtccacgtcacttcagaaggtgcaggccttcagttgggcaaggtaactgtcctgggagttgctacagcaccgcagcaggtcttgtccaacggacggcccgtaagcaactttacctatagtcctgataccaaagttctggacatctgcgttgctctgctgatgggtgagcagttcctggtatcatggtgc

SEQ ID NO: 362 - protein, 944 aa, synthetic construct
  REGION 1..944: note = Variant of the Homo Sapiens Lysosomal alpha-glucosidase
MEWSWVFLFFLSVTTGVHSGHILWHDFSTVPRELSGSSQVLEETHPAHQVGASRPGPRDAQYHPGRPRAVPTQCDVPENSRFDCAPEKAITQEQCEARGCCYIPAKQGLQGAQMGQPWCFFPPSYPSYKLENLSQSEMGYTATLTRTTPSFFPKDILTLRLDVMMETENRLHFTIKDPANRRYEVPLETPHVHSRAPSPLYSVEFSEEPFGVIVRRQLDGRVLLNTTVAPLFFADQFLQLSTSLPSQYITGLAEHLSPLMLSTSWNKITLWNRDLAPTPGANLYGSHPFYLALEDGGSAHGVFLLNSNAMDVVLQPSPALSWRSTGGILDVYIFLGPEPKSVVQQYLDVVGYPFMPPYWGLGFHLCRWGYSSTAITRQVVENMTRAHFPLDVQWNDLDYMDSRRDFTFNKDGFRDFPAMVQELHQGGRRYMMIVDPGISSSGPAGSYRPYDEGLRRGVFITNETGQPLIGKVWPGSTAFPDFTNPEALAWWEDMVAEFHDQVPFDGMWIDMNEPSNFIRGSVDGCPNNELENPPYVPGVVGGTLQAATICASSHQFLSTHYNLHNLYGTTEAIASHRALVKARGTRPFVISRSTFAGHGRYAGHWTGDVWSSWEQLASSVPEILQFNLLGVPLVGADVCGFLGNTSEELCVRWTQLGAFYPFMRNHNSLTSLPQEPYSFSEPAQQAMRKALGLRYALLPHLYTLFHQAHVHGETVARPLFLEFPKDSSTWTVDHQMLWGEALLITPVLQPGKAEVTGYFPLGTWYDLQTVPVEALGSLPPPPAAPREPAIHSEGQWVTLPAPLDTINVHLREGYIIPLQGPGLTTTESRKQPMALAVALTKSGEARGELFWDDGESLEVLERGAYTQVIFEARNNTIVNELVHVTSEGAGLQLGKVTVLGVATAPQQVLSNGRPVSNFTYSPDTKVLDICVALLMGEQFLVSWC

SEQ ID NO: 363 - DNA, 2832 bp, synthetic construct
  misc_feature 1..2832: note = Variant of the Homo Sapiens Lysosomal alpha-glucosidase
  source 1..2832: mol_type = other DNA
atggaatggagctgggtctttctcttcttcctgtcagtaacgactggtgtccactccggacacattctgtggcatgattttctgaccgtgcctagagagctttccggttcaagtcaagtcctcgaagaaacacatccagcccatcaggttggcgcatctaggccgggccctcgggacgctcaactccacccagggagacctagggccgttcccactcagtgcgacgtgccagagaactcacgcttcgattgtgcacctgagaaggctatcacgcaagagcagtgcgaggcccgcggatgttgttacataccggctaaacaggggctgcagggtgcgcagatgggccaaccttggtgcttcttcccaccatcctatccgagttacaagctggagaatctctcccagtctgaaatgggatataccgcaacactgactcggaccaccccctccttctttcccaaagatatcttgactctgagacttgacgtaatgatggagacagaaaacaggctccactttaccattaaggaccctgccaatcgccgatacgaggtgcctctggaaacaccacacgtgcacagtagagctccatcacctctgtattctgtcgagttctccgaagagccgtttggcgttatcgtcaggaggcagctcgacgggcgagtgcttctgaacacgactgtggccccgttgttctttgcggatcagtttctgcaactgtcaacaagtctcccttctcagtacattaccgggcttgcagagcatctgtccccactcatgctgagtacttcatggaacaaaatcacactgtggaatagagaccttgctcctactccaggagccaacttgtatggttctcaccctttctacttggccctggaagatggcggatcagcgcatggcgtattcctcctgaattccaacgcaatggacgttgttcttcagccatctcctgctttgagttggagatctacaggcgggatactggacgtctacatctttctgggtccagagcctaaatccgtagtgcagcagtatcttgatgtcgtcggatacccgtttatgccaccatattggggcctggggttccacttgtgccgctggggatattcatccaccgccattacacgacaagttgttgagaatatgaccagggcacattttcctctggatgtacagtggaacgacctggactacatggatagtcgccgcgacttcaccttcaataaggatgggttcagagactttcctgctatggtccaagaacttcaccagggaggcaggaggtacatgatgatcgtagatccgggaatttcttcttctggcccagccggttcatacagaccgtatgacgaaggactgcgacgaggcgtctttatcacgaacgagactggtcagcctttgataggcaaggtttggccagggtccaccgctttcccggatttcacaaatcctgaggcactggcctggtgggaagatatggtcgccgagtttcacgaccaggtcccatttgacgggatgtggatcgacatgaacgagccatccaacttcattagaggaagtgtggatggctgtccgaataatgagctggaaaaccctccttacgtaccaggcgttgttggtgggactcttcaagctgcgacgatttgcgcatcctcccatcagttcctgtcaacccactataacttgcacaatctgtacgggacaacagaggctatcgccagtcatagggccctggtaaaagctagaggaacacgccctttcgttatctctcgctcaacttttgcaggccacggtaggtatgccggacattggaccggcgacgtctggagttcttgggaacagctggcttcctccgttccagagatattgcagtttaacctgttgggagtcccacttgtaggtgcagatgtttgtggcttcctggggaacacctcagaagaattgtgcgtaagatggactcaactgggcgccttctacccttttatgcgcaatcacaactcactgacatctttgcctcaagaaccgtactcatttagtgagccagcacagcaggccatgaggaaggctcttggcctgagatatgcacttctgccgcatctgtacacccttttccaccaggctcatgtccatggagagactgttgcacgacctctgttcttggagttcccaaaagactcttccacgtggacagtcgatcaccagatgctgtggggcgaggctctgctgattacacctgtattgcaacctggtaaggccgaagttaccgggtactttccattggggacctggtatgatctgcaaacagtcccggttgaagctcttggaagtcttccacctccacctgctgcaccaagggagcctgcgatccactctgaaggacagtgggtaactttgcctgcaccgctggacaccatcaatgtccatctgcgcgaaggctacatcataccacttcaaggtcctggactgaccactacagagtctagaaaacaaccaatggctcttgctgttgcactgactaaaagcggcgaagcaaggggtgagctgttctgggacgacggagagtcactggaggtactcgaacgaggcgcgtatacgcaggtcatttttgaggctcgcaataatacgatcgttaacgagctggtccacgtcacttcagaaggtgcaggccttcagttgggcaaggtaactgtcctgggagttgctacagcaccgcagcaggtcttgtccaacggacggcccgtaagcaactttacctatagtcctgataccaaagttctggacatctgcgttgctctgctgatgggtgagcagttcctggtatcatggtgc

SEQ ID NO: 364 - protein, 944 aa, synthetic construct
  REGION 1..944: note = Variant of the Homo Sapiens Lysosomal alpha-glucosidase
MEWSWVFLFFLSVTTGVHSGHILWHDFLTVPRELSGSSQVLEETHPAHQVGASRPGPRDAQLHPGRPRAVPTQCDVPENSRFDCAPEKAITQEQCEARGCCYIPAKQGLQGAQMGQPWCFFPPSYPSYKLENLSQSEMGYTATLTRTTPSFFPKDILTLRLDVMMETENRLHFTIKDPANRRYEVPLETPHVHSRAPSPLYSVEFSEEPFGVIVRRQLDGRVLLNTTVAPLFFADQFLQLSTSLPSQYITGLAEHLSPLMLSTSWNKITLWNRDLAPTPGANLYGSHPFYLALEDGGSAHGVFLLNSNAMDVVLQPSPALSWRSTGGILDVYIFLGPEPKSVVQQYLDVVGYPFMPPYWGLGFHLCRWGYSSTAITRQVVENMTRAHFPLDVQWNDLDYMDSRRDFTFNKDGFRDFPAMVQELHQGGRRYMMIVDPGISSSGPAGSYRPYDEGLRRGVFITNETGQPLIGKVWPGSTAFPDFTNPEALAWWEDMVAEFHDQVPFDGMWIDMNEPSNFIRGSVDGCPNNELENPPYVPGVVGGTLQAATICASSHQFLSTHYNLHNLYGTTEAIASHRALVKARGTRPFVISRSTFAGHGRYAGHWTGDVWSSWEQLASSVPEILQFNLLGVPLVGADVCGFLGNTSEELCVRWTQLGAFYPFMRNHNSLTSLPQEPYSFSEPAQQAMRKALGLRYALLPHLYTLFHQAHVHGETVARPLFLEFPKDSSTWTVDHQMLWGEALLITPVLQPGKAEVTGYFPLGTWYDLQTVPVEALGSLPPPPAAPREPAIHSEGQWVTLPAPLDTINVHLREGYIIPLQGPGLTTTESRKQPMALAVALTKSGEARGELFWDDGESLEVLERGAYTQVIFEARNNTIVNELVHVTSEGAGLQLGKVTVLGVATAPQQVLSNGRPVSNFTYSPDTKVLDICVALLMGEQFLVSWC

SEQ ID NO: 365 - DNA, 2832 bp, synthetic construct
  misc_feature 1..2832: note = Variant of the Homo Sapiens Lysosomal alpha-glucosidase
  source 1..2832: mol_type = other DNA
atggaatggagctgggtctttctcttcttcctgtcagtaacgactggtgtccactccggacacattctgtggcatgatttttctaccgtgcctagagagctttccggttcaagtcaagtcctcgaagaaacacatccagcccatcaggttggcgcatctaggccgggccctcgggacgctcaactccacccagggagacctagggccgttcccactcagtgcgacgtgccagagaactcacgcttcgattgtgcacctgagaaggctatcacgcaagagcagtgcgaggcccgcggatgttgttacataccggctaaacaggggctgcagggtgcgcagatgggccaaccttggtgcttcttcccaccatcctatccgagttacaagctggagaatctctcccagtctgaaatgggatataccgcaacactgactcggaccaccccctccttctttcccaaagatatcttgactctgagacttgacgtaatgatggagacagaaaacaggctccactttaccattaaggaccctgccaatcgccgatacgaggtgcctctggaaacaccacacgtgcacagtagagctccatcacctctgtattctgtcgagttctccgaagagccgtttggcgttatcgtcaggaggcagctcgacgggcgagtgcttctgaacacgactgtggccccgttgttctttgcggatcagtttctgcaactgtcaacaagtctcccttctcagtacattaccgggcttgcagagcatctgtccccactcatgctgagtacttcatggaacaaaatcacactgtggaatagagaccttgctcctactccaggagccaacttgtatggttctcaccctttctacttggccctggaagatggcggatcagcgcatggcgtattcctcctgaattccaacgcaatggacgttgttcttcagccatctcctgctttgagttggagatctacaggcgggatactggacgtctacatctttctgggtccagagcctaaatccgtagtgcagcagtatcttgatgtcgtcggatacccgtttatgccaccatattggggcctggggttccacttgtgccgctggggatattcatccaccgccattacacgacaagttgttgagaatatgaccagggcacattttcctctggatgtacagtggaacgacctggactacatggatagtcgccgcgacttcaccttcaataaggatgggttcagagactttcctgctatggtccaagaacttcaccagggaggcaggaggtacatgatgatcgtagatccgggaatttcttcttctggcccagccggttcatacagaccgtatgacgaaggactgcgacgaggcgtctttatcacgaacgagactggtcagcctttgataggcaaggtttggccagggtccaccgctttcccggatttcacaaatcctgaggcactggcctggtgggaagatatggtcgccgagtttcacgaccaggtcccatttgacgggatgtggatcgacatgaacgagccatccaacttcattagaggaagtgtggatggctgtccgaataatgagctggaaaaccctccttacgtaccaggcgttgttggtgggactcttcaagctgcgacgatttgcgcatcctcccatcagttcctgtcaacccactataacttgcacaatctgtacgggacaacagaggctatcgccagtcatagggccctggtaaaagctagaggaacacgccctttcgttatctctcgctcaacttttgcaggccacggtaggtatgccggacattggaccggcgacgtctggagttcttgggaacagctggcttcctccgttccagagatattgcagtttaacctgttgggagtcccacttgtaggtgcagatgtttgtggcttcctggggaacacctcagaagaattgtgcgtaagatggactcaactgggcgccttctacccttttatgcgcaatcacaactcactgacatctttgcctcaagaaccgtactcatttagtgagccagcacagcaggccatgaggaaggctcttggcctgagatatgcacttctgccgcatctgtacacccttttccaccaggctcatgtccatggagagactgttgcacgacctctgttcttggagttcccaaaagactcttccacgtggacagtcgatcaccagatgctgtggggcgaggctctgctgattacacctgtattgcaaaagggtaaggccgaagttaccgggtactttccattggggacctggtatgatctgcaaacagtcccggttgaagctcttggaagtcttccacctccacctgctgcaccaagggagcctgcgatccactctgaaggacagtgggtaactttgcctgcaccgctggacaccatcaatgtccatctgcgcgaaggctacatcataccacttcaaggtcctggactgaccactacagagtctagaaaacaaccaatggctcttgctgttgcactgactaaaagcggcgaagcaaggggtgagctgttctgggacgacggagagtcactggaggtactcgaacgaggcgcgtatacgcaggtcatttttgaggctcgcaataatacgatcgttaacgagctggtccacgtcacttcagaaggtgcaggccttcagttgggcaaggtaactgtcctgggagttgctacagcaccgcagcaggtcttgtccaacggacggcccgtaagcaactttacctatagtcctgataccaaagttctggacatctgcgttgctctgctgatgggtgagcagttcctggtatcatggtgc

SEQ ID NO: 366 - protein, 944 aa, synthetic construct
  REGION 1..944: note = Variant of the Homo Sapiens Lysosomal alpha-glucosidase
MEWSWVFLFFLSVTTGVHSGHILWHDFSTVPRELSGSSQVLEETHPAHQVGASRPGPRDAQLHPGRPRAVPTQCDVPENSRFDCAPEKAITQEQCEARGCCYIPAKQGLQGAQMGQPWCFFPPSYPSYKLENLSQSEMGYTATLTRTTPSFFPKDILTLRLDVMMETENRLHFTIKDPANRRYEVPLETPHVHSRAPSPLYSVEFSEEPFGVIVRRQLDGRVLLNTTVAPLFFADQFLQLSTSLPSQYITGLAEHLSPLMLSTSWNKITLWNRDLAPTPGANLYGSHPFYLALEDGGSAHGVFLLNSNAMDVVLQPSPALSWRSTGGILDVYIFLGPEPKSVVQQYLDVVGYPFMPPYWGLGFHLCRWGYSSTAITRQVVENMTRAHFPLDVQWNDLDYMDSRRDFTFNKDGFRDFPAMVQELHQGGRRYMMIVDPGISSSGPAGSYRPYDEGLRRGVFITNETGQPLIGKVWPGSTAFPDFTNPEALAWWEDMVAEFHDQVPFDGMWIDMNEPSNFIRGSVDGCPNNELENPPYVPGVVGGTLQAATICASSHQFLSTHYNLHNLYGTTEAIASHRALVKARGTRPFVISRSTFAGHGRYAGHWTGDVWSSWEQLASSVPEILQFNLLGVPLVGADVCGFLGNTSEELCVRWTQLGAFYPFMRNHNSLTSLPQEPYSFSEPAQQAMRKALGLRYALLPHLYTLFHQAHVHGETVARPLFLEFPKDSSTWTVDHQMLWGEALLITPVLQKGKAEVTGYFPLGTWYDLQTVPVEALGSLPPPPAAPREPAIHSEGQWVTLPAPLDTINVHLREGYIIPLQGPGLTTTESRKQPMALAVALTKSGEARGELFWDDGESLEVLERGAYTQVIFEARNNTIVNELVHVTSEGAGLQLGKVTVLGVATAPQQVLSNGRPVSNFTYSPDTKVLDICVALLMGEQFLVSWC

SEQ ID NO: 367 - DNA, 2832 bp, synthetic construct
  misc_feature 1..2832: note = Variant of the Homo Sapiens Lysosomal alpha-glucosidase
  source 1..2832: mol_type = other DNA
atggaatggagctgggtctttctcttcttcctgtcagtaacgactggtgtccactccggacacattctgtggcatgatttttctaccgtgcctagagagctttccggttcaagtcaagtcctcgaagaaacacatccagcccatcaggttggcgcatctaggccgggccctcgggacgctcaactccacccagggagacctagggccgttcccactcagtgcgacgtgccagctaactcacgcttcgattgtgcacctgagaaggctatcacgcaagagcagtgcgaggcccgcggatgttgttacataccggctaaacaggggctgcagggtgcgcagatgggccaaccttggtgcttcttcccaccatcctatccgagttacaagctggagaatctctcccagtctgaaatgggatataccgcaacactgactcggaccaccccctccttctttcccaaagatatcttgactctgagacttgacgtaatgatggagacagaaaacaggctccactttaccattaaggaccctgccaatcgccgatacgaggtgcctctggaaacaccacacgtgcacagtagagctccatcacctctgtattctgtcgagttctccgaagagccgtttggcgttatcgtcaggaggcagctcgacgggcgagtgcttctgaacacgactgtggccccgttgttctttgcggatcagtttctgcaactgtcaacaagtctcccttctcagtacattaccgggcttgcagagcatctgtccccactcatgctgagtacttcatggaacaaaatcacactgtggaatagagaccttgctcctactccaggagccaacttgtatggttctcaccctttctacttggccctggaagatggcggatcagcgcatggcgtattcctcctgaattccaacgcaatggacgttgttcttcagccatctcctgctttgagttggagatctacaggcgggatactggacgtctacatctttctgggtccagagcctaaatccgtagtgcagcagtatcttgatgtcgtcggatacccgtttatgccaccatattggggcctggggttccacttgtgccgctggggatattcatccaccgccattacacgacaagttgttgagaatatgaccagggcacattttcctctggatgtacagtggaacgacctggactacatggatagtcgccgcgacttcaccttcaataaggatgggttcagagactttcctgctatggtccaagaacttcaccagggaggcaggaggtacatgatgatcgtagatccgggaatttcttcttctggcccagccggttcatacagaccgtatgacgaaggactgcgacgaggcgtctttatcacgaacgagactggtcagcctttgataggcaaggtttggccagggtccaccgctttcccggatttcacaaatcctgaggcactggcctggtgggaagatatggtcgccgagtttcacgaccaggtcccatttgacgggatgtggatcgacatgaacgagccatccaacttcattagaggaagtgtggatggctgtccgaataatgagctggaaaaccctccttacgtaccaggcgttgttggtgggactcttcaagctgcgacgatttgcgcatcctcccatcagttcctgtcaacccactataacttgcacaatctgtacgggacaacagaggctatcgccagtcatagggccctggtaaaagctagaggaacacgccctttcgttatctctcgctcaacttttgcaggccacggtaggtatgccggacattggaccggcgacgtctggagttcttgggaacagctggcttcctccgttccagagatattgcagtttaacctgttgggagtcccacttgtaggtgcagatgtttgtggcttcctggggaacacctcagaagaattgtgcgtaagatggactcaactgggcgccttctacccttttatgcgcaatcacaactcactgacatctttgcctcaagaaccgtactcatttagtgagccagcacagcaggccatgaggaaggctcttggcctgagatatgcacttctgccgcatctgtacacccttttccaccaggctcatgtccatggagagactgttgcacgacctctgttcttggagttcccaaaagactcttccacgtggacagtcgatcaccagatgctgtggggcgaggctctgctgattacacctgtattgcaacctggtaaggccgaagttaccgggtactttccattggggacctggtatgatctgcaaacagtcccggttgaagctcttggaagtcttccacctccacctgctgcaccaagggagcctgcgatccactctgaaggacagtgggtaactttgcctgcaccgctggacaccatcaatgtccatctgcgcgaaggctacatcataccacttcaaggtcctggactgaccactacagagtctagaaaacaaccaatggctcttgctgttgcactgactaaaagcggcgaagcaaggggtgagctgttctgggacgacggagagtcactggaggtactcgaacgaggcgcgtatacgcaggtcatttttgaggctcgcaataatacgatcgttaacgagctggtccacgtcacttcagaaggtgcaggccttcagttgggcaaggtaactgtcctgggagttgctacagcaccgcagcaggtcttgtccaacggacggcccgtaagcaactttacctatagtcctgataccaaagttctggacatctgcgttgctctgctgatgggtgagcagttcctggtatcatggtgc

SEQ ID NO: 368 - protein, 944 aa, synthetic construct
  REGION 1..944: note = Variant of the Homo Sapiens Lysosomal alpha-glucosidase
MEWSWVFLFFLSVTTGVHSGHILWHDFSTVPRELSGSSQVLEETHPAHQVGASRPGPRDAQLHPGRPRAVPTQCDVPANSRFDCAPEKAITQEQCEARGCCYIPAKQGLQGAQMGQPWCFFPPSYPSYKLENLSQSEMGYTATLTRTTPSFFPKDILTLRLDVMMETENRLHFTIKDPANRRYEVPLETPHVHSRAPSPLYSVEFSEEPFGVIVRRQLDGRVLLNTTVAPLFFADQFLQLSTSLPSQYITGLAEHLSPLMLSTSWNKITLWNRDLAPTPGANLYGSHPFYLALEDGGSAHGVFLLNSNAMDVVLQPSPALSWRSTGGILDVYIFLGPEPKSVVQQYLDVVGYPFMPPYWGLGFHLCRWGYSSTAITRQVVENMTRAHFPLDVQWNDLDYMDSRRDFTFNKDGFRDFPAMVQELHQGGRRYMMIVDPGISSSGPAGSYRPYDEGLRRGVFITNETGQPLIGKVWPGSTAFPDFTNPEALAWWEDMVAEFHDQVPFDGMWIDMNEPSNFIRGSVDGCPNNELENPPYVPGVVGGTLQAATICASSHQFLSTHYNLHNLYGTTEAIASHRALVKARGTRPFVISRSTFAGHGRYAGHWTGDVWSSWEQLASSVPEILQFNLLGVPLVGADVCGFLGNTSEELCVRWTQLGAFYPFMRNHNSLTSLPQEPYSFSEPAQQAMRKALGLRYALLPHLYTLFHQAHVHGETVARPLFLEFPKDSSTWTVDHQMLWGEALLITPVLQPGKAEVTGYFPLGTWYDLQTVPVEALGSLPPPPAAPREPAIHSEGQWVTLPAPLDTINVHLREGYIIPLQGPGLTTTESRKQPMALAVALTKSGEARGELFWDDGESLEVLERGAYTQVIFEARNNTIVNELVHVTSEGAGLQLGKVTVLGVATAPQQVLSNGRPVSNFTYSPDTKVLDICVALLMGEQFLVSWC

SEQ ID NO: 369 - DNA, 2832 bp, synthetic construct
  misc_feature 1..2832: note = Variant of the Homo Sapiens Lysosomal alpha-glucosidase
  source 1..2832: mol_type = other DNA
atggaatggagctgggtctttctcttcttcctgtcagtaacgactggtgtccactccggacacattctgtggcatgatttttctaccgtgcctagagagctttccggttcaagtcaagtcctcgaagaaacacatccagcccatcaggggggcgcatctaggccgggccctcgggacgctcaactccacccagggagacctagggccgttcccactcagtgcgacgtgccagagaactcacgcttcgattgtgcacctgagaaggctatcacgcaagagcagtgcgaggcccgcggatgttgttacataccggctaaacaggggctgcagggtgcgcagatgggccaaccttggtgcttcttcccaccatcctatccgagttacaagctggagaatctctcccagtctgaaatgggatataccgcaacactgactcggaccaccccctccttctttcccaaagatatcttgactctgagacttgacgtaatgatggagacagaaaacaggctccactttaccattaaggaccctgccaatcgccgatacgaggtgcctctggaaacaccacacgtgcacagtagagctccatcacctctgtattctgtcgagttctccgaagagccgtttggcgttatcgtcaggaggcagctcgacgggcgagtgcttctgaacacgactgtggccccgttgttctttgcggatcagtttctgcaactgtcaacaagtctcccttctcagtacattaccgggcttgcagagcatctgtccccactcatgctgagtacttcatggaacaaaatcacactgtggaatagagaccttgctcctactccaggagccaacttgtatggttctcaccctttctacttggccctggaagatggcggatcagcgcatggcgtattcctcctgaattccaacgcaatggacgttgttcttcagccatctcctgctttgagttggagatctacaggcgggatactggacgtctacatctttctgggtccagagcctaaatccgtagtgcagcagtatcttgatgtcgtcggatacccgtttatgccaccatattggggcctggggttccacttgtgccgctggggatattcatccaccgccattacacgacaagttgttgagaatatgaccagggcacattttcctctggatgtacagtggaacgacctggactacatggatagtcgccgcgacttcaccttcaataaggatgggttcagagactttcctgctatggtccaagaacttcaccagggaggcaggaggtacatgatgatcgtagatccgggaatttcttcttctggcccagccggttcatacagaccgtatgacgaaggactgcgacgaggcgtctttatcacgaacgagactggtcagcctttgataggcaaggtttggccagggtccaccgctttcccggatttcacaaatcctgaggcactggcctggtgggaagatatggtcgccgagtttcacgaccaggtcccatttgacgggatgtggatcgacatgaacgagccatccaacttcattagaggaagtgtggatggctgtccgaataatgagctggaaaaccctccttacgtaccaggcgttgttggtgggactcttcaagctgcgacgatttgcgcatcctcccatcagttcctgtcaacccactataacttgcacaatctgtacgggacaacagaggctatcgccagtcatagggccctggtaaaagctagaggaacacgccctttcgttatctctcgctcaacttttgcaggccacggtaggtatgccggacattggaccggcgacgtctggagttcttgggaacagctggcttcctccgttccagagatattgcagtttaacctgttgggagtcccacttgtaggtgcagatgtttgtggcttcctggggaacacctcagaagaattgtgcgtaagatggactcaactgggcgccttctacccttttatgcgcaatcacaactcactgacatctttgcctcaagaaccgtactcatttagtgagccagcacagcaggccatgaggaaggctcttggcctgagatatgcacttctgccgcatctgtacacccttttccaccaggctcatgtccatggagagactgttgcacgacctctgttcttggagttcccaaaagactcttccacgtggacagtcgatcaccagatgctgtggggcgaggctctgctgattacacctgtattgcaacctggtaaggccgaagttaccgggtactttccattggggacctggtatgatctgcaaacagtcccggttgaagctcttggaagtcttccacctccacctgctgcaccaagggagcctgcgatccactctgaaggacagtgggtaactttgcctgcaccgctggacaccatcaatgtccatctgcgcgaaggctacatcataccacttcaaggtcctggactgaccactacagagtctagaaaacaaccaatggctcttgctgttgcactgactaaaagcggcgaagcaaggggtgagctgttctgggacgacggagagtcactggaggtactcgaacgaggcgcgtatacgcaggtcatttttgaggctcgcaataatacgatcgttaacgagctggtccacgtcacttcagaaggtgcaggccttcagttgggcaaggtaactgtcctgggagttgctacagcaccgcagcaggtcttgtccaacggacggcccgtaagcaactttacctatagtcctgataccaaagttctggacatctgcgttgctctgctgatgggtgagcagttcctggtatcatggtgc

SEQ ID NO: 370 - protein, 944 aa, synthetic construct
  REGION 1..944: note = Variant of the Homo Sapiens Lysosomal alpha-glucosidase
MEWSWVFLFFLSVTTGVHSGHILWHDFSTVPRELSGSSQVLEETHPAHQGGASRPGPRDAQLHPGRPRAVPTQCDVPENSRFDCAPEKAITQEQCEARGCCYIPAKQGLQGAQMGQPWCFFPPSYPSYKLENLSQSEMGYTATLTRTTPSFFPKDILTLRLDVMMETENRLHFTIKDPANRRYEVPLETPHVHSRAPSPLYSVEFSEEPFGVIVRRQLDGRVLLNTTVAPLFFADQFLQLSTSLPSQYITGLAEHLSPLMLSTSWNKITLWNRDLAPTPGANLYGSHPFYLALEDGGSAHGVFLLNSNAMDVVLQPSPALSWRSTGGILDVYIFLGPEPKSVVQQYLDVVGYPFMPPYWGLGFHLCRWGYSSTAITRQVVENMTRAHFPLDVQWNDLDYMDSRRDFTFNKDGFRDFPAMVQELHQGGRRYMMIVDPGISSSGPAGSYRPYDEGLRRGVFITNETGQPLIGKVWPGSTAFPDFTNPEALAWWEDMVAEFHDQVPFDGMWIDMNEPSNFIRGSVDGCPNNELENPPYVPGVVGGTLQAATICASSHQFLSTHYNLHNLYGTTEAIASHRALVKARGTRPFVISRSTFAGHGRYAGHWTGDVWSSWEQLASSVPEILQFNLLGVPLVGADVCGFLGNTSEELCVRWTQLGAFYPFMRNHNSLTSLPQEPYSFSEPAQQAMRKALGLRYALLPHLYTLFHQAHVHGETVARPLFLEFPKDSSTWTVDHQMLWGEALLITPVLQPGKAEVTGYFPLGTWYDLQTVPVEALGSLPPPPAAPREPAIHSEGQWVTLPAPLDTINVHLREGYIIPLQGPGLTTTESRKQPMALAVALTKSGEARGELFWDDGESLEVLERGAYTQVIFEARNNTIVNELVHVTSEGAGLQLGKVTVLGVATAPQQVLSNGRPVSNFTYSPDTKVLDICVALLMGEQFLVSWC

SEQ ID NO: 371 - DNA, 2832 bp, synthetic construct
  misc_feature 1..2832: note = Variant of the Homo Sapiens Lysosomal alpha-glucosidase
  source 1..2832: mol_type = other DNA
atggaatggagctgggtctttctcttcttcctgtcagtaacgactggtgtccactccggacacattctgtggcatgatttttctaccgtgcctagagagctttccggttcaagtcaagtcctcgaagaaacacatccagcccatcaggttggcgcatctaggccgggccctcgggacgctcaactccacccagggagacctagggccgttcccactcagtgcgacgtgccagagaactcacgcttcgattgtgcacctgagaaggctatcacgcaagagcagtgcgaggcccgcggatgttgttacataccggctaaacaggggctgcagggtgcgcagatgggccaaccttggtgcttcttcccaccatcctatccgagttacaagctggagaatctctcccagtctgaaatgggatataccgcaacactgactcggaccaccccctccttctttcccaaagatatcttgactctgagacttgacgtaatgatggagacagaaaacaggctccactttaccattaaggaccctgccaatcgccgatacgaggtgcctctggaaacaccacacgtgcacagtagagctccatcacctctgtattctgtcgagttctccgaagagccgtttggcgttatcgtcaggaggcagctcgacgggcgagtgcttctgaacacgactgtggccccgttgttctttgcggatcagtttctgcaactgtcaacaagtctcccttctcagtacattaccgggcttgcagagcatctgtccccactcatgctgagtacttcatggaacaaaatcacactgtggaatagagaccttgctcctactccaggagccaacttgtatggttctcaccctttctacttggccctggaagatggcggatcagcgcatggcgtattcctcctgaattccaacgcaatggacgttgttcttcagccatctcctgctttgagttggagatctacaggcgggatactggacgtctacatctttctgggtccagagcctaaatccgtagtgcagcagtatcttgatgtcgtcggatacccgtttatgccaccatattggggcctggggttccacttgtgccgctggggatattcatccaccgccattacacgacaagttgttgagaatatgaccagggcacattttcctctggatgtacagtggaacgacctggactacatggatagtcgccgcgacttcaccttcaataaggatgggttcagagactttcctgctatggtccaagaacttcaccagggaggcaggaggtacatgatgatcgtagatccgggaatttcttcttctggcccagccggttcatacagaccgtatgacgaaggactgcgacgaggcgtctttatcacgaacgagactggtcagcctttgataggcaaggtttggccagggtccaccgctttcccggatttcacaaatcctgaggcactggcctggtgggaagatatggtcgccgagtttcacgaccaggtcccatttgacgggatgtggatcgacatgaacgagccatccaacttcattagaggaagtgtggatggctgtccgaataatgagctggaaaaccctccttacgtaccaggcgttgttggtgggactcttcaagctgcgacgatttgcgcatcctcccatcagttcctgtcaacccactataacttgcacaatctgtacgggacaacagaggctatcgccagtcatagggccctggtaaaagctagaggaacacgccctttcgttatctctcgctcaacttttgcaggccacggtaggtatgccggacattggaccggcgacgtctggagttcttgggaacagctggcttcctccgttccagagatattgcagtttaacctgttgggagtcccacttgtaggtgcagatgtttgtggcttcctggggaacacctcagaagaattgtgcgtaagatggactcaactgggcgccttctacccttttatgcgcaatcacaactcactgacatctttgcctcaagaaccgtactcatttagtgagccagcacagcaggccatgaggaaggctcttggcctgagatatgcacttctgccgcatctgtacacccttttccaccaggctcatgtccatggagagactgttgcacgacctctgttcttggagttcccaaaagactcttccacgtggacagtcgatcaccagatgctgtggggcgaggctctgctgattacacctgtattgcaacctggtaaggccgaagttaccgggtactttccattggggacctggtatgatctgcaaacagtcccggttgaagctcttggaagtcttccacctccacctgctgcaccaagggagcctgcgatccactctgaaggacagtgggtaactttgcctgcaccgctggacaccatcaatgtccatctgcgcgaaggctacatcataccacttcaaggtcctggactgaccactacagagtctagaaaacaaccaatggctcttgctgttgcactgactaaaagcggcgaagcaaggggtgagctgttctgggacgacggagagtcactggaggtactcgaacgaggcgcgtatacgcaggtcatttttgaggctcgcaataatacgatcgttaacgagctggtccacgtcacttcagaaggtgcaggccttcagttgaagaaggtaactgtcctgggagttgctacagcaccgcagcaggtcttgtccaacggacggcccgtaagcaactttacctatagtcctgataccaaagttctggacatctgcgttgctctgctgatgggtgagcagttcctggtatcatggtgc

SEQ ID NO: 372 - protein, 944 aa, synthetic construct
  REGION 1..944: note = Variant of the Homo Sapiens Lysosomal alpha-glucosidase
MEWSWVFLFFLSVTTGVHSGHILWHDFSTVPRELSGSSQVLEETHPAHQVGASRPGPRDAQLHPGRPRAVPTQCDVPENSRFDCAPEKAITQEQCEARGCCYIPAKQGLQGAQMGQPWCFFPPSYPSYKLENLSQSEMGYTATLTRTTPSFFPKDILTLRLDVMMETENRLHFTIKDPANRRYEVPLETPHVHSRAPSPLYSVEFSEEPFGVIVRRQLDGRVLLNTTVAPLFFADQFLQLSTSLPSQYITGLAEHLSPLMLSTSWNKITLWNRDLAPTPGANLYGSHPFYLALEDGGSAHGVFLLNSNAMDVVLQPSPALSWRSTGGILDVYIFLGPEPKSVVQQYLDVVGYPFMPPYWGLGFHLCRWGYSSTAITRQVVENMTRAHFPLDVQWNDLDYMDSRRDFTFNKDGFRDFPAMVQELHQGGRRYMMIVDPGISSSGPAGSYRPYDEGLRRGVFITNETGQPLIGKVWPGSTAFPDFTNPEALAWWEDMVAEFHDQVPFDGMWIDMNEPSNFIRGSVDGCPNNELENPPYVPGVVGGTLQAATICASSHQFLSTHYNLHNLYGTTEAIASHRALVKARGTRPFVISRSTFAGHGRYAGHWTGDVWSSWEQLASSVPEILQFNLLGVPLVGADVCGFLGNTSEELCVRWTQLGAFYPFMRNHNSLTSLPQEPYSFSEPAQQAMRKALGLRYALLPHLYTLFHQAHVHGETVARPLFLEFPKDSSTWTVDHQMLWGEALLITPVLQPGKAEVTGYFPLGTWYDLQTVPVEALGSLPPPPAAPREPAIHSEGQWVTLPAPLDTINVHLREGYIIPLQGPGLTTTESRKQPMALAVALTKSGEARGELFWDDGESLEVLERGAYTQVIFEARNNTIVNELVHVTSEGAGLQLKKVTVLGVATAPQQVLSNGRPVSNFTYSPDTKVLDICVALLMGEQFLVSWC

SEQ ID NO: 373 - DNA, 2832 bp, synthetic construct
  misc_feature 1..2832: note = Variant of the Homo Sapiens Lysosomal alpha-glucosidase
  source 1..2832: mol_type = other DNA
atggaatggagctgggtctttctcttcttcctgtcagtaacgactggtgtccactccggacacattctgtggcatgatttttctaccgtgcctagagagctttccggttcaagtcaagtcctcgaagaaacacatccagcccatcaggttggcgcatctaggccgggccctcgggacgctcaactccacccagggagacctagggccgttcccactcagtgcgacgtgccagagaactcacgcttcgattgtgcacctgagaaggctatcacgcaagagcagtgcgaggcccgcggatgttgttacataccggctaaacaggggctgcagggtgcgcagatgggccaaccttggtgcttcttcccaccatcctatccgagttacaagctggagaatctctcccagtctgaaatgggatataccgcaacactgactcggaccaccccctccttctttcccaaagatatcttgactctgagacttgacgtaatgatggagacagaaaacaggctccactttaccattaaggaccctgccaatcgccgatacgaggtgcctctggaaacaccacacgtgcacagtagagctccatcacctctgtattctgtcgagttctccgaagagccgtttggcgttatcgtcaggaggcagctcgacgggcgagtgcttctgaacacgactgtggccccgttgttctttgcggatcagtttctgcaactgtcaacaagtctcccttctcagtacattaccgggcttgcagagcatctgtccccactcatgctgagtacttcatggaacaaaatcacactgtggaatagagaccttgctcctactccaggagccaacttgtatggttctcaccctttctacttggccctggaagatggcggatcagcgcatggcgtattcctcctgaattccaacgcaatggacgttgttcttcagccatctcctgctttgagttggagatctacaggcgggatactggacgtctacatctttctgggtccagagcctaaatccgtagtgcagcagtatcttgatgtcgtcggatacccgtttatgccaccatattggggcctggggttccacttgtgccgctggggatattcatccaccgccattacacgacaagttgttgagaatatgaccagggcacattttcctctggatgtacagtggaacgacctggactacatggatagtcgccgcgacttcaccttcaataaggatgggttcagagactttcctgctatggtccaagaacttcaccagggaggcaggaggtacatgatgatcgtagatccgtctatttcttcttctggcccagccggttcatacagaccgtatgacgaaggactgcgacgaggcgtctttatcacgaacgagactggtcagcctttgataggcaaggtttggccagggtccaccgctttcccggatttcacaaatcctgaggcactggcctggtgggaagatatggtcgccgagtttcacgaccaggtcccatttgacgggatgtggatcgacatgaacgagccatccaacttcattagaggaagtgtggatggctgtccgaataatgagctggaaaaccctccttacgtaccaggcgttgttggtgggactcttcaagctgcgacgatttgcgcatcctcccatcagttcctgtcaacccactataacttgcacaatctgtacgggacaacagaggctatcgccagtcatagggccctggtaaaagctagaggaacacgccctttcgttatctctcgctcaacttttgcaggccacggtaggtatgccggacattggaccggcgacgtctggagttcttgggaacagctggcttcctccgttccagagatattgcagtttaacctgttgggagtcccacttgtaggtgcagatgtttgtggcttcctggggaacacctcagaagaattgtgcgtaagatggactcaactgggcgccttctacccttttatgcgcaatcacaactcactgacatctttgcctcaagaaccgtactcatttagtgagccagcacagcaggccatgaggaaggctcttggcctgagatatgcacttctgccgcatctgtacacccttttccaccaggctcatgtccatggagagactgttgcacgacctctgttcttggagttcccaaaagactcttccacgtggacagtcgatcaccagatgctgtggggcgaggctctgctgattacacctgtattgcaacctggtaaggccgaagttaccgggtactttccattggggacctggtatgatctgcaaacagtcccggttgaagctcttggaagtcttccacctccacctgctgcaccaagggagcctgcgatccactctgaaggacagtgggtaactttgcctgcaccgctggacaccatcaatgtccatctgcgcgaaggctacatcataccacttcaaggtcctggactgaccactacagagtctagaaaacaaccaatggctcttgctgttgcactgactaaaagcggcgaagcaaggggtgagctgttctgggacgacggagagtcactggaggtactcgaacgaggcgcgtatacgcaggtcatttttgaggctcgcaataatacgatcgttaacgagctggtccacgtcacttcagaaggtgcaggccttcagttgggcaaggtaactgtcctgggagttgctacagcaccgcagcaggtcttgtccaacggacggcccgtaagcaactttacctatagtcctgataccaaagttctggacatctgcgttgctctgctgatgggtgagcagttcctggtatcatggtgc

SEQ ID NO: 374 - protein, 944 aa, synthetic construct
  REGION 1..944: note = Variant of the Homo Sapiens Lysosomal alpha-glucosidase
MEWSWVFLFFLSVTTGVHSGHILWHDFSTVPRELSGSSQVLEETHPAHQVGASRPGPRDAQLHPGRPRAVPTQCDVPENSRFDCAPEKAITQEQCEARGCCYIPAKQGLQGAQMGQPWCFFPPSYPSYKLENLSQSEMGYTATLTRTTPSFFPKDILTLRLDVMMETENRLHFTIKDPANRRYEVPLETPHVHSRAPSPLYSVEFSEEPFGVIVRRQLDGRVLLNTTVAPLFFADQFLQLSTSLPSQYITGLAEHLSPLMLSTSWNKITLWNRDLAPTPGANLYGSHPFYLALEDGGSAHGVFLLNSNAMDVVLQPSPALSWRSTGGILDVYIFLGPEPKSVVQQYLDVVGYPFMPPYWGLGFHLCRWGYSSTAITRQVVENMTRAHFPLDVQWNDLDYMDSRRDFTFNKDGFRDFPAMVQELHQGGRRYMMIVDPSISSSGPAGSYRPYDEGLRRGVFITNETGQPLIGKVWPGSTAFPDFTNPEALAWWEDMVAEFHDQVPFDGMWIDMNEPSNFIRGSVDGCPNNELENPPYVPGVVGGTLQAATICASSHQFLSTHYNLHNLYGTTEAIASHRALVKARGTRPFVISRSTFAGHGRYAGHWTGDVWSSWEQLASSVPEILQFNLLGVPLVGADVCGFLGNTSEELCVRWTQLGAFYPFMRNHNSLTSLPQEPYSFSEPAQQAMRKALGLRYALLPHLYTLFHQAHVHGETVARPLFLEFPKDSSTWTVDHQMLWGEALLITPVLQPGKAEVTGYFPLGTWYDLQTVPVEALGSLPPPPAAPREPAIHSEGQWVTLPAPLDTINVHLREGYIIPLQGPGLTTTESRKQPMALAVALTKSGEARGELFWDDGESLEVLERGAYTQVIFEARNNTIVNELVHVTSEGAGLQLGKVTVLGVATAPQQVLSNGRPVSNFTYSPDTKVLDICVALLMGEQFLVSWC

SEQ ID NO: 375 - DNA, 2832 bp, synthetic construct
  misc_feature 1..2832: note = Variant of the Homo Sapiens Lysosomal alpha-glucosidase
  source 1..2832: mol_type = other DNA
atggaatggagctgggtctttctcttcttcctgtcagtaacgactggtgtccactccggacacattctgtggcatgatttttctaccgtgcctagagagctttccggttcaagtcaagtcctcgaagaaacacatccagcccatcaggttggcgcatctaggccgggccctcgggacgctcaactccacccagggagacctagggccgttcccactcagtgcgacgtgccagagaactcacgcttcgattgtgcacctgagaaggctatcacgcaagagcagtgcgaggcccgcggatgttgttacataccggctaaacaggggctgcagggtgcgcagatgggccaaccttggtgcttcttcccaccatcctatccgagttacaagctggagaatctctcccagtctgaaatgggatataccgcaacactgactcggaccaccccctccttctttcccaaagatatcttgactctgagacttgacgtaatgatggagacagaaaacaggctccactttaccattaaggaccctgccaatcgccgatacgaggtgcctctggaaacaccacacgtgcacagtagagctccatcacctctgtattctgtcgagttctccgaagagccgtttggcgttatcgtcaggaggcagctcgacgggcgagtgcttctgaacacgactgtggccccgttgttctttgcggatcagtttctgcaactgtcaacaagtctcccttctcagtacattaccgggcttgcagagcatctgtccccactcatgctgagtacttcatggaacaaaatcacactgtggaatagagaccttgctcctactccaggagccaacttgtatggttctcaccctttctacttggccctggaagatggcggatcagcgcatggcgtattcctcctgaattccaacgcaatggacgttgttcttcagccatctcctgctttgagttggagatctacaggcgggatactggacgtctacatctttctgggtccagagcctaaatccgtagtgcagcagtatcttgatgtcgtcggatacccgtttatgccaccatattggggcctggggttccacttgtgccgctggggatattcatccaccgccattacacgacaagttgttgagaatatgaccagggcacattttcctctggatgtacagtggaacgacctggactacatggatagtcgccgcgacttcaccttcaataaggatgggttcagagactttcctgctatggtccaagaacttcaccagggaggcaggaggtacatgatgatcgtagatccgggaatttcttcttctggcccagccggttcatacagaccgtatgacgaaggactgcgacgaggcgtctttatcacgaacgagactggtcagcctttgataggcaaggtttggccagggtccaccgctttcccggatttcacaaatcctgaggcactggcctggtgggaagatatggtcgccgagtttcacgaccaggtcccatttgacgggatgtggatcgacatgaacgagccatccaacttcattagaggaagtgtggatggctgtccgaataatgagctggaaaaccctccttacgtaccaggcgttgttggtgggactcttcaagctgcgacgatttgcgcatcctcccatcagttcctgtcaacccactataacttgcacaatctgtacgggacaacagaggctatcgccagtcatagggccctggtaaaagctagaggaacacgccctttcgttatctctcgctcaacttttgcaggccacggtaggtatgccggacattggaccggcgacgtctggagttcttgggaacagctggcttcctccgttccagagatattgcagtttaacctgttgggagtcccacttgtaggtgcagatgtttgtggcttcctggggaacacctcagaagaattgtgcgtaagatggactcaactgggcgccttctacccttttatgcgcaatcacaactcactgacatctttgcctcaagaaccgtactcatttagtgagccagcacagcaggccatgaggaaggctcttgagctgagatatgcacttctgccgcatctgtacacccttttccaccaggctcatgtccatggagagactgttgcacgacctctgttcttggagttcccaaaagactcttccacgtggacagtcgatcaccagatgctgtggggcgaggctctgctgattacacctgtattgcaacctggtaaggccgaagttaccgggtactttccattggggacctggtatgatctgcaaacagtcccggttgaagctcttggaagtcttccacctccacctgctgcaccaagggagcctgcgatccactctgaaggacagtgggtaactttgcctgcaccgctggacaccatcaatgtccatctgcgcgaaggctacatcataccacttcaaggtcctggactgaccactacagagtctagaaaacaaccaatggctcttgctgttgcactgactaaaagcggcgaagcaaggggtgagctgttctgggacgacggagagtcactggaggtactcgaacgaggcgcgtatacgcaggtcatttttgaggctcgcaataatacgatcgttaacgagctggtccacgtcacttcagaaggtgcaggccttcagttgggcaaggtaactgtcctgggagttgctacagcaccgcagcaggtcttgtccaacggacggcccgtaagcaactttacctatagtcctgataccaaagttctggacatctgcgttgctctgctgatgggtgagcagttcctggtatcatggtgc

SEQ ID NO: 376 - protein, 944 aa, synthetic construct
  REGION 1..944: note = Variant of the Homo Sapiens Lysosomal alpha-glucosidase
MEWSWVFLFFLSVTTGVHSGHILWHDFSTVPRELSGSSQVLEETHPAHQVGASRPGPRDAQLHPGRPRAVPTQCDVPENSRFDCAPEKAITQEQCEARGCCYIPAKQGLQGAQMGQPWCFFPPSYPSYKLENLSQSEMGYTATLTRTTPSFFPKDILTLRLDVMMETENRLHFTIKDPANRRYEVPLETPHVHSRAPSPLYSVEFSEEPFGVIVRRQLDGRVLLNTTVAPLFFADQFLQLSTSLPSQYITGLAEHLSPLMLSTSWNKITLWNRDLAPTPGANLYGSHPFYLALEDGGSAHGVFLLNSNAMDVVLQPSPALSWRSTGGILDVYIFLGPEPKSVVQQYLDVVGYPFMPPYWGLGFHLCRWGYSSTAITRQVVENMTRAHFPLDVQWNDLDYMDSRRDFTFNKDGFRDFPAMVQELHQGGRRYMMIVDPGISSSGPAGSYRPYDEGLRRGVFITNETGQPLIGKVWPGSTAFPDFTNPEALAWWEDMVAEFHDQVPFDGMWIDMNEPSNFIRGSVDGCPNNELENPPYVPGVVGGTLQAATICASSHQFLSTHYNLHNLYGTTEAIASHRALVKARGTRPFVISRSTFAGHGRYAGHWTGDVWSSWEQLASSVPEILQFNLLGVPLVGADVCGFLGNTSEELCVRWTQLGAFYPFMRNHNSLTSLPQEPYSFSEPAQQAMRKALELRYALLPHLYTLFHQAHVHGETVARPLFLEFPKDSSTWTVDHQMLWGEALLITPVLQPGKAEVTGYFPLGTWYDLQTVPVEALGSLPPPPAAPREPAIHSEGQWVTLPAPLDTINVHLREGYIIPLQGPGLTTTESRKQPMALAVALTKSGEARGELFWDDGESLEVLERGAYTQVIFEARNNTIVNELVHVTSEGAGLQLGKVTVLGVATAPQQVLSNGRPVSNFTYSPDTKVLDICVALLMGEQFLVSWC

SEQ ID NO: 377 - DNA, 2832 bp, synthetic construct
  misc_feature 1..2832: note = Variant of the Homo Sapiens Lysosomal alpha-glucosidase
  source 1..2832: mol_type = other DNA
atggaatggagctgggtctttctcttcttcctgtcagtaacgactggtgtccactccggacacattctgtggcatgatttttctaccgtgcctagagagctttccggttcaagtcaagtcctcgaagaaacacatccagcccatcaggttggcgcatctaggccgggccctcgggacgctcaactccacccagggagacctagggccgttcccactcagtgcgacgtgccagagaactcacgcttcgattgtgcacctgagaaggctatcacgcaagagcagtgcgaggcccgcggatgttgttacataccggctaaacaggggctgcagggtgcgcagatgggccaaccttggtgcttcttcccaccatcctatccgagttacaagctggagaatctctcccagtctgaaatgggatataccgcaacactgactcggaccaccccctccttctttcccaaagatatcttgactctgagacttgacgtaatgatggagacagaaaacaggctccactttaccattaaggaccctgccaatcgccgatacgaggtgcctctggaaacaccacacgtgcacagtagagctccatcacctctgtattctgtcgagttctccgaagagccgtttggcgttatcgtcaggaggcagctcgacgggcgagtgcttctgaacacgactgtggccccgttgttctttgcggatcagtttctgcaactgtcaacaagtctcccttctcagtacattaccgggcttgcagagcatctgtccccactcatgctgagtacttcatggaacaaaatcacactgtggaatagagaccttgctcctactccaggagccaacttgtatggttctcaccctttctacttggccctggaagatggcggatcagcgcatggcgtattcctcctgaattccaacgcaatggacgttgttcttcagccatctcctgctttgagttggagatctacaggcgggatactggacgtctacatctttctgggtccagagcctaaatccgtagtgcagcagtatcttgatgtcgtcggatacccgtttatgccaccatattggggcctggggttccacttgtgccgctggggatattcatccaccgccattacacgacaagttgttgagaatatgaccagggcacattttcctctggatgtacagtggaacgacctggactacatggatagtcgccgcgacttcaccttcaataaggatgggttcagagactttcctgctatggtccaagaacttcaccagggaggcaggaggtacatgatgatcgtagatccgggaatttcttcttctggcccagccggttcatacagaccgtatgacgaaggactgcgacgaggcgtctttatcacgaacgagactggtcagcctttgataggcaaggtttggccagggtccaccgctttcccggatttcacaaatcctgaggcactggcctggtgggaagatatggtcgccgagtttcacgaccaggtcccatttgacgggatgtggatcgacatgaacgagccatccaacttcattagaggaagtgtggatggctgtccgaataatgagctggaaaaccctccttacgtaccaggcgttgttggtgggactcttcaagctgcgacgatttgcgcatcctcccatcagttcctgtcaacccactataacttgcacaatctgtacgggcctacagaggctatcgccagtcatagggccctggtaaaagctagaggaacacgccctttcgttatctctcgctcaacttttgcaggccacggtaggtatgccggacattggaccggcgacgtctggagttcttgggaacagctggcttcctccgttccagagatattgcagtttaacctgttgggagtcccacttgtaggtgcagatgtttgtggcttcctggggaacacctcagaagaattgtgcgtaagatggactcaactgggcgccttctacccttttatgcgcaatcacaactcactgacatctttgcctcaagaaccgtactcatttagtgagccagcacagcaggccatgaggaaggctcttggcctgagatatgcacttctgccgcatctgtacacccttttccaccaggctcatgtccatggagagactgttgcacgacctctgttcttggagttcccaaaagactcttccacgtggacagtcgatcaccagatgctgtggggcgaggctctgctgattacacctgtattgcaacctggtaaggccgaagttaccgggtactttccattggggacctggtatgatctgcaaacagtcccggttgaagctcttggaagtcttccacctccacctgctgcaccaagggagcctgcgatccactctgaaggacagtgggtaactttgcctgcaccgctggacaccatcaatgtccatctgcgcgaaggctacatcataccacttcaaggtcctggactgaccactacagagtctagaaaacaaccaatggctcttgctgttgcactgactaaaagcggcgaagcaaggggtgagctgttctgggacgacggagagtcactggaggtactcgaacgaggcgcgtatacgcaggtcatttttgaggctcgcaataatacgatcgttaacgagctggtccacgtcacttcagaaggtgcaggccttcagttgggcaaggtaactgtcctgggagttgctacagcaccgcagcaggtcttgtccaacggacggcccgtaagcaactttacctatagtcctgataccaaagttctggacatctgcgttgctctgctgatgggtgagcagttcctggtatcatggtgc

SEQ ID NO: 378 - protein, 944 aa, synthetic construct
  REGION 1..944: note = Variant of the Homo Sapiens Lysosomal alpha-glucosidase
MEWSWVFLFFLSVTTGVHSGHILWHDFSTVPRELSGSSQVLEETHPAHQVGASRPGPRDAQLHPGRPRAVPTQCDVPENSRFDCAPEKAITQEQCEARGCCYIPAKQGLQGAQMGQPWCFFPPSYPSYKLENLSQSEMGYTATLTRTTPSFFPKDILTLRLDVMMETENRLHFTIKDPANRRYEVPLETPHVHSRAPSPLYSVEFSEEPFGVIVRRQLDGRVLLNTTVAPLFFADQFLQLSTSLPSQYITGLAEHLSPLMLSTSWNKITLWNRDLAPTPGANLYGSHPFYLALEDGGSAHGVFLLNSNAMDVVLQPSPALSWRSTGGILDVYIFLGPEPKSVVQQYLDVVGYPFMPPYWGLGFHLCRWGYSSTAITRQVVENMTRAHFPLDVQWNDLDYMDSRRDFTFNKDGFRDFPAMVQELHQGGRRYMMIVDPGISSSGPAGSYRPYDEGLRRGVFITNETGQPLIGKVWPGSTAFPDFTNPEALAWWEDMVAEFHDQVPFDGMWIDMNEPSNFIRGSVDGCPNNELENPPYVPGVVGGTLQAATICASSHQFLSTHYNLHNLYGPTEAIASHRALVKARGTRPFVISRSTFAGHGRYAGHWTGDVWSSWEQLASSVPEILQFNLLGVPLVGADVCGFLGNTSEELCVRWTQLGAFYPFMRNHNSLTSLPQEPYSFSEPAQQAMRKALGLRYALLPHLYTLFHQAHVHGETVARPLFLEFPKDSSTWTVDHQMLWGEALLITPVLQPGKAEVTGYFPLGTWYDLQTVPVEALGSLPPPPAAPREPAIHSEGQWVTLPAPLDTINVHLREGYIIPLQGPGLTTTESRKQPMALAVALTKSGEARGELFWDDGESLEVLERGAYTQVIFEARNNTIVNELVHVTSEGAGLQLGKVTVLGVATAPQQVLSNGRPVSNFTYSPDTKVLDICVALLMGEQFLVSWC

SEQ ID NO: 379 - DNA, 2832 bp, synthetic construct
  misc_feature 1..2832: note = Variant of the Homo Sapiens Lysosomal alpha-glucosidase
  source 1..2832: mol_type = other DNA
atggaatggagctgggtctttctcttcttcctgtcagtaacgactggtgtccactccggacacattctgtggcatgatttttctaccgtgcctagagagctttccggttcaagtcaagtcctcgaagaaacacatccagcccatcaggttggcgcatctaggccgggccctcgggacgctcaactccacccagggagacctagggccgttcccactcagtgcgacgtgccagagaactcacgcttcgattgtgcacctgagaaggctatcacgcaagagcagtgcgaggcccgcggatgttgttacataccggctaaacaggggctgcagggtgcgcagatgggccaaccttggtgcttcttcccaccatcctatccgagttacaagctggagaatctctcccagtctgaaatgggatataccgcaacactgactcggaccaccccctccttctttcccaaagatatcttgactctgagacttgacgtaatgatggagacagaaaacaggctccactttaccattaaggaccctgccaatcgccgatacgaggtgcctctggaaacaccacacgtgcacagtagagctccatcacctctgtattctgtcgagttctccgaagagccgtttggcgttatcgtcaggaggcagctcgacgggcgagtgcttctgaacacgactgtggccccgttgttctttgcggatcagtttctgcaactgtcaacaagtctcccttctcagtacattaccgggcttgcagagcatctgtccccactcatgctgagtacttcatggaacaaaatcacactgtggaatagagaccttgctcctactccaggagccaacttgtatggttctcaccctttctacttggccctggaagatggcggatcagcgcatggcgtattcctcctgaattccaacgcaatggacgttgttcttcagccatctcctgctttgagttggagatctacaggcgggatactggacgtctacatctttctgggtccagagcctaaatccgtagtgcagcagtatcttgatgtcgtcggatacccgtttatgccaccatattggggcctggggttccacttgtgccgctggggatattcatccaccgccattacacgacaagttgttgagaatatgaccagggcacattttcctctggatgtacagtggaacgacctggactacatggatagtcgccgcgacttcaccttcaataaggatgggttcagagactttcctgctatggtccaagaacttcaccagggaggcaggaggtacatgatgatcgtagatccgggaatttcttcttctggcccagccggttcatacagaccgtatgacgaaggactgcgacgaggcgtctttatcacgaacgagactggtcagcctttgataggcaaggtttggccagggtccaccgctttcccggatttcacaaatcctgaggcactggcctggtgggaagatatggtcgccgagtttcacgaccaggtcccatttgacgggatgtggatcgacatgaacgagccatccaacttcattagaggaagtgtggatggctgtccgaataatgagctggaaaaccctccttacgtaccaggcgttgttggtgggactcttcaagctgcgacgatttgcgcatcctcccatcagttcctgtcaacccactataacttgcacaatctgtacgggaatacagaggctatcgccagtcatagggccctggtaaaagctagaggaacacgccctttcgttatctctcgctcaacttttgcaggccacggtaggtatgccggacattggaccggcgacgtctggagttcttgggaacagctggcttcctccgttccagagatattgcagtttaacctgttgggagtcccacttgtaggtgcagatgtttgtggcttcctggggaacacctcagaagaattgtgcgtaagatggactcaactgggcgccttctacccttttatgcgcaatcacaactcactgacatctttgcctcaagaaccgtactcatttagtgagccagcacagcaggccatgaggaaggctcttggcctgagatatgcacttctgccgcatctgtacacccttttccaccaggctcatgtccatggagagactgttgcacgacctctgttcttggagttcccaaaagactcttccacgtggacagtcgatcaccagatgctgtggggcgaggctctgctgattacacctgtattgcaacctggtaaggccgaagttaccgggtactttccattggggacctggtatgatctgcaaacagtcccggttgaagctcttggaagtcttccacctccacctgctgcaccaagggagcctgcgatccactctgaaggacagtgggtaactttgcctgcaccgctggacaccatcaatgtccatctgcgcgaaggctacatcataccacttcaaggtcctggactgaccactacagagtctagaaaacaaccaatggctcttgctgttgcactgactaaaagcggcgaagcaaggggtgagctgttctgggacgacggagagtcactggaggtactcgaacgaggcgcgtatacgcaggtcatttttgaggctcgcaataatacgatcgttaacgagctggtccacgtcacttcagaaggtgcaggccttcagttgggcaaggtaactgtcctgggagttgctacagcaccgcagcaggtcttgtccaacggacggcccgtaagcaactttacctatagtcctgataccaaagttctggacatctgcgttgctctgctgatgggtgagcagttcctggtatcatggtgc

SEQ ID NO: 380 - protein, 944 aa, synthetic construct
  REGION 1..944: note = Variant of the Homo Sapiens Lysosomal alpha-glucosidase
MEWSWVFLFFLSVTTGVHSGHILWHDFSTVPRELSGSSQVLEETHPAHQVGASRPGPRDAQLHPGRPRAVPTQCDVPENSRFDCAPEKAITQEQCEARGCCYIPAKQGLQGAQMGQPWCFFPPSYPSYKLENLSQSEMGYTATLTRTTPSFFPKDILTLRLDVMMETENRLHFTIKDPANRRYEVPLETPHVHSRAPSPLYSVEFSEEPFGVIVRRQLDGRVLLNTTVAPLFFADQFLQLSTSLPSQYITGLAEHLSPLMLSTSWNKITLWNRDLAPTPGANLYGSHPFYLALEDGGSAHGVFLLNSNAMDVVLQPSPALSWRSTGGILDVYIFLGPEPKSVVQQYLDVVGYPFMPPYWGLGFHLCRWGYSSTAITRQVVENMTRAHFPLDVQWNDLDYMDSRRDFTFNKDGFRDFPAMVQELHQGGRRYMMIVDPGISSSGPAGSYRPYDEGLRRGVFITNETGQPLIGKVWPGSTAFPDFTNPEALAWWEDMVAEFHDQVPFDGMWIDMNEPSNFIRGSVDGCPNNELENPPYVPGVVGGTLQAATICASSHQFLSTHYNLHNLYGNTEAIASHRALVKARGTRPFVISRSTFAGHGRYAGHWTGDVWSSWEQLASSVPEILQFNLLGVPLVGADVCGFLGNTSEELCVRWTQLGAFYPFMRNHNSLTSLPQEPYSFSEPAQQAMRKALGLRYALLPHLYTLFHQAHVHGETVARPLFLEFPKDSSTWTVDHQMLWGEALLITPVLQPGKAEVTGYFPLGTWYDLQTVPVEALGSLPPPPAAPREPAIHSEGQWVTLPAPLDTINVHLREGYIIPLQGPGLTTTESRKQPMALAVALTKSGEARGELFWDDGESLEVLERGAYTQVIFEARNNTIVNELVHVTSEGAGLQLGKVTVLGVATAPQQVLSNGRPVSNFTYSPDTKVLDICVALLMGEQFLVSWC

SEQ ID NO: 381 - DNA, 2832 bp, synthetic construct
  misc_feature 1..2832: note = Variant of the Homo Sapiens Lysosomal alpha-glucosidase
  source 1..2832: mol_type = other DNA
atggaatggagctgggtctttctcttcttcctgtcagtaacgactggtgtccactccggacacattctgtggcatgatttttctaccgtgcctagagagctttccggttcaagtcaagtcctcgaagaaacacatccagcccatcaggttggcgcatctaggccgggccctcgggacgctcaactccacccagggagacctagggccgttcccactcagtgcgacgtgccagagaactcacgcttcgattgtgcacctgataaggctatcacgcaagagcagtgcgaggcccgcggatgttgttacataccggctaaacaggggctgcagggtgcgcagatgggccaaccttggtgcttcttcccaccatcctatccgagttacaagctggagaatctctcccagtctgaaatgggatataccgcaacactgactcggaccaccccctccttctttcccaaagatatcttgactctgagacttgacgtaatgatggagacagaaaacaggctccactttaccattaaggaccctgccaatcgccgatacgaggtgcctctggaaacaccacacgtgcacagtagagctccatcacctctgtattctgtcgagttctccgaagagccgtttggcgttatcgtcaggaggcagctcgacgggcgagtgcttctgaacacgactgtggccccgttgttctttgcggatcagtttctgcaactgtcaacaagtctcccttctcagtacattaccgggcttgcagagcatctgtccccactcatgctgagtacttcatggaacaaaatcacactgtggaatagagaccttgctcctactccaggagccaacttgtatggttctcaccctttctacttggccctggaagatggcggatcagcgcatggcgtattcctcctgaattccaacgcaatggacgttgttcttcagccatctcctgctttgagttggagatctacaggcgggatactggacgtctacatctttctgggtccagagcctaaatccgtagtgcagcagtatcttgatgtcgtcggatacccgtttatgccaccatattggggcctggggttccacttgtgccgctggggatattcatccaccgccattacacgacaagttgttgagaatatgaccagggcacattttcctctggatgtacagtggaacgacctggactacatggatagtcgccgcgacttcaccttcaataaggatgggttcagagactttcctgctatggtccaagaacttcaccagggaggcaggaggtacatgatgatcgtagatccgggaatttcttcttctggcccagccggttcatacagaccgtatgacgaaggactgcgacgaggcgtctttatcacgaacgagactggtcagcctttgataggcaaggtttggccagggtccaccgctttcccggatttcacaaatcctgaggcactggcctggtgggaagatatggtcgccgagtttcacgaccaggtcccatttgacgggatgtggatcgacatgaacgagccatccaacttcattagaggaagtgtggatggctgtccgaataatgagctggaaaaccctccttacgtaccaggcgttgttggtgggactcttcaagctgcgacgatttgcgcatcctcccatcagttcctgtcaacccactataacttgcacaatctgtacgggacaacagaggctatcgccagtcatagggccctggtaaaagctagaggaacacgccctttcgttatctctcgctcaacttttgcaggccacggtaggtatgccggacattggaccggcgacgtctggagttcttgggaacagctggcttcctccgttccagagatattgcagtttaacctgttgggagtcccacttgtaggtgcagatgtttgtggcttcctggggaacacctcagaagaattgtgcgtaagatggactcaactgggcgccttctacccttttatgcgcaatcacaactcactgacatctttgcctcaagaaccgtactcatttagtgagccagcacagcaggccatgaggaaggctcttggcctgagatatgcacttctgccgcatctgtacacccttttccaccaggctcatgtccatggagagactgttgcacgacctctgttcttggagttcccaaaagactcttccacgtggacagtcgatcaccagatgctgtggggcgaggctctgctgattacacctgtattgcaacctggtaaggccgaagttaccgggtactttccattggggacctggtatgatctgcaaacagtcccggttgaagctcttggaagtcttccacctccacctgctgcaccaagggagcctgcgatccactctgaaggacagtgggtaactttgcctgcaccgctggacaccatcaatgtccatctgcgcgaaggctacatcataccacttcaaggtcctggactgaccactacagagtctagaaaacaaccaatggctcttgctgttgcactgactaaaagcggcgaagcaaggggtgagctgttctgggacgacggagagtcactggaggtactcgaacgaggcgcgtatacgcaggtcatttttgaggctcgcaataatacgatcgttaacgagctggtccacgtcacttcagaaggtgcaggccttcagttgggcaaggtaactgtcctgggagttgctacagcaccgcagcaggtcttgtccaacggacggcccgtaagcaactttacctatagtcctgataccaaagttctggacatctgcgttgctctgctgatgggtgagcagttcctggtatcatggtgc

SEQ ID NO: 382 - protein, 944 aa, synthetic construct
  REGION 1..944: note = Variant of the Homo Sapiens Lysosomal alpha-glucosidase
MEWSWVFLFFLSVTTGVHSGHILWHDFSTVPRELSGSSQVLEETHPAHQVGASRPGPRDAQLHPGRPRAVPTQCDVPENSRFDCAPDKAITQEQCEARGCCYIPAKQGLQGAQMGQPWCFFPPSYPSYKLENLSQSEMGYTATLTRTTPSFFPKDILTLRLDVMMETENRLHFTIKDPANRRYEVPLETPHVHSRAPSPLYSVEFSEEPFGVIVRRQLDGRVLLNTTVAPLFFADQFLQLSTSLPSQYITGLAEHLSPLMLSTSWNKITLWNRDLAPTPGANLYGSHPFYLALEDGGSAHGVFLLNSNAMDVVLQPSPALSWRSTGGILDVYIFLGPEPKSVVQQYLDVVGYPFMPPYWGLGFHLCRWGYSSTAITRQVVENMTRAHFPLDVQWNDLDYMDSRRDFTFNKDGFRDFPAMVQELHQGGRRYMMIVDPGISSSGPAGSYRPYDEGLRRGVFITNETGQPLIGKVWPGSTAFPDFTNPEALAWWEDMVAEFHDQVPFDGMWIDMNEPSNFIRGSVDGCPNNELENPPYVPGVVGGTLQAATICASSHQFLSTHYNLHNLYGTTEAIASHRALVKARGTRPFVISRSTFAGHGRYAGHWTGDVWSSWEQLASSVPEILQFNLLGVPLVGADVCGFLGNTSEELCVRWTQLGAFYPFMRNHNSLTSLPQEPYSFSEPAQQAMRKALGLRYALLPHLYTLFHQAHVHGETVARPLFLEFPKDSSTWTVDHQMLWGEALLITPVLQPGKAEVTGYFPLGTWYDLQTVPVEALGSLPPPPAAPREPAIHSEGQWVTLPAPLDTINVHLREGYIIPLQGPGLTTTESRKQPMALAVALTKSGEARGELFWDDGESLEVLERGAYTQVIFEARNNTIVNELVHVTSEGAGLQLGKVTVLGVATAPQQVLSNGRPVSNFTYSPDTKVLDICVALLMGEQFLVSWC

SEQ ID NO: 383 - DNA, 2832 bp, synthetic construct
  misc_feature 1..2832: note = Variant of the Homo Sapiens Lysosomal alpha-glucosidase
  source 1..2832: mol_type = other DNA
atggaatggagctgggtctttctcttcttcctgtcagtaacgactggtgtccactccggacacattctgtggcatgatttttctaccgtgcctagagagctttccggttcaagtcaagtcctcgaagaaacacatccagcccatcaggttggcgcatctaggccgggccctcgggacgctcaactccacccagggagacctagggccgttcccactcagtgcgacgtgccagagaactcacgcttcgattgtgcacctgagaaggctatcacgcaagagcagtgcgaggcccgcggatgttgttacataccggctaaacaggggctgcagggtgcgcagatgggccaaccttggtgcttcttcccaccatcctatccgagttacaagctggagaatctctccaattctgaaatgggatataccgcaacactgactcggaccaccccctccttctttcccaaagatatcttgactctgagacttgacgtaatgatggagacagaaaacaggctccactttaccattaaggaccctgccaatcgccgatacgaggtgcctctggaaacaccacacgtgcacagtagagctccatcacctctgtattctgtcgagttctccgaagagccgtttggcgttatcgtcaggaggcagctcgacgggcgagtgcttctgaacacgactgtggccccgttgttctttgcggatcagtttctgcaactgtcaacaagtctcccttctcagtacattaccgggcttgcagagcatctgtccccactcatgctgagtacttcatggaacaaaatcacactgtggaatagagaccttgctcctactccaggagccaacttgtatggttctcaccctttctacttggccctggaagatggcggatcagcgcatggcgtattcctcctgaattccaacgcaatggacgttgttcttcagccatctcctgctttgagttggagatctacaggcgggatactggacgtctacatctttctgggtccagagcctaaatccgtagtgcagcagtatcttgatgtcgtcggatacccgtttatgccaccatattggggcctggggttccacttgtgccgctggggatattcatccaccgccattacacgacaagttgttgagaatatgaccagggcacattttcctctggatgtacagtggaacgacctggactacatggatagtcgccgcgacttcaccttcaataaggatgggttcagagactttcctgctatggtccaagaacttcaccagggaggcaggaggtacatgatgatcgtagatccgggaatttcttcttctggcccagccggttcatacagaccgtatgacgaaggactgcgacgaggcgtctttatcacgaacgagactggtcagcctttgataggcaaggtttggccagggtccaccgctttcccggatttcacaaatcctgaggcactggcctggtgggaagatatggtcgccgagtttcacgaccaggtcccatttgacgggatgtggatcgacatgaacgagccatccaacttcattagaggaagtgtggatggctgtccgaataatgagctggaaaaccctccttacgtaccaggcgttgttggtgggactcttcaagctgcgacgatttgcgcatcctcccatcagttcctgtcaacccactataacttgcacaatctgtacgggacaacagaggctatcgccagtcatagggccctggtaaaagctagaggaacacgccctttcgttatctctcgctcaacttttgcaggccacggtaggtatgccggacattggaccggcgacgtctggagttcttgggaacagctggcttcctccgttccagagatattgcagtttaacctgttgggagtcccacttgtaggtgcagatgtttgtggcttcctggggaacacctcagaagaattgtgcgtaagatggactcaactgggcgccttctacccttttatgcgcaatcacaactcactgacatctttgcctcaagaaccgtactcatttagtgagccagcacagcaggccatgaggaaggctcttggcctgagatatgcacttctgccgcatctgtacacccttttccaccaggctcatgtccatggagagactgttgcacgacctctgttcttggagttcccaaaagactcttccacgtggacagtcgatcaccagatgctgtggggcgaggctctgctgattacacctgtattgcaacctggtaaggccgaagttaccgggtactttccattggggacctggtatgatctgcaaacagtcccggttgaagctcttggaagtcttccacctccacctgctgcaccaagggagcctgcgatccactctgaaggacagtgggtaactttgcctgcaccgctggacaccatcaatgtccatctgcgcgaaggctacatcataccacttcaaggtcctggactgaccactacagagtctagaaaacaaccaatggctcttgctgttgcactgactaaaagcggcgaagcaaggggtgagctgttctgggacgacggagagtcactggaggtactcgaacgaggcgcgtatacgcaggtcatttttgaggctcgcaataatacgatcgttaacgagctggtccacgtcacttcagaaggtgcaggccttcagttgggcaaggtaactgtcctgggagttgctacagcaccgcagcaggtcttgtccaacggacggcccgtaagcaactttacctatagtcctgataccaaagttctggacatctgcgttgctctgctgatgggtgagcagttcctggtatcatggtgc

SEQ ID NO: 384 - protein, 944 aa, synthetic construct
  REGION 1..944: note = Variant of the Homo Sapiens Lysosomal alpha-glucosidase
MEWSWVFLFFLSVTTGVHSGHILWHDFSTVPRELSGSSQVLEETHPAHQVGASRPGPRDAQLHPGRPRAVPTQCDVPENSRFDCAPEKAITQEQCEARGCCYIPAKQGLQGAQMGQPWCFFPPSYPSYKLENLSNSEMGYTATLTRTTPSFFPKDILTLRLDVMMETENRLHFTIKDPANRRYEVPLETPHVHSRAPSPLYSVEFSEEPFGVIVRRQLDGRVLLNTTVAPLFFADQFLQLSTSLPSQYITGLAEHLSPLMLSTSWNKITLWNRDLAPTPGANLYGSHPFYLALEDGGSAHGVFLLNSNAMDVVLQPSPALSWRSTGGILDVYIFLGPEPKSVVQQYLDVVGYPFMPPYWGLGFHLCRWGYSSTAITRQVVENMTRAHFPLDVQWNDLDYMDSRRDFTFNKDGFRDFPAMVQELHQGGRRYMMIVDPGISSSGPAGSYRPYDEGLRRGVFITNETGQPLIGKVWPGSTAFPDFTNPEALAWWEDMVAEFHDQVPFDGMWIDMNEPSNFIRGSVDGCPNNELENPPYVPGVVGGTLQAATICASSHQFLSTHYNLHNLYGTTEAIASHRALVKARGTRPFVISRSTFAGHGRYAGHWTGDVWSSWEQLASSVPEILQFNLLGVPLVGADVCGFLGNTSEELCVRWTQLGAFYPFMRNHNSLTSLPQEPYSFSEPAQQAMRKALGLRYALLPHLYTLFHQAHVHGETVARPLFLEFPKDSSTWTVDHQMLWGEALLITPVLQPGKAEVTGYFPLGTWYDLQTVPVEALGSLPPPPAAPREPAIHSEGQWVTLPAPLDTINVHLREGYIIPLQGPGLTTTESRKQPMALAVALTKSGEARGELFWDDGESLEVLERGAYTQVIFEARNNTIVNELVHVTSEGAGLQLGKVTVLGVATAPQQVLSNGRPVSNFTYSPDTKVLDICVALLMGEQFLVSWC

SEQ ID NO: 385 - DNA, 2832 bp, synthetic construct
  misc_feature 1..2832: note = Variant of the Homo Sapiens Lysosomal alpha-glucosidase
  source 1..2832: mol_type = other DNA
atggaatggagctgggtctttctcttcttcctgtcagtaacgactggtgtccactccggacacattctgtggcatgatttttctaccgtgcctagagagctttccggttcaagtcaagtcctcgaagaaacacatccagcccatcaggttggcgcatctaggccgggccctcgggacgctcaactccacccagggagacctagggccgttcccactcagtgcgacgtgccagagaactcacgcttcgattgtgcacctgagaaggctatcacgcaagagcagtgcgaggcccgcggatgttgttacataccggctaaacaggggctgcagggtgcgcagatgggccaaccttggtgcttcttcccaccatcctatccgagttacaagctggagaatctctcccagtctgaaatgggatataccgcaacactgactcggaccaccccctccttctttcccaaagatatcttgactctgagacttgacgtaatgatggagacagaaaacaggctccactttaccattaaggaccctgccaatcgccgatacgaggtgcctctggaaacaccacacgtgcacagtagagctccatcacctctgtattctgtcgagttctccgaagagccgtttggcgttatcgtcaggaggcagctcgacgggcgagtgcttctgaacacgactgtggccccgttgttctttgcggatcagtttctgcaactgtcaacaagtctcccttctcagtacattaccgggcttgcagagcatctgtccccactcatgctgagtacttcatggaacaaaatcacactgtggaatagagaccttgctcctactccaggagccaacttgtatggttctcaccctttctacttggccctggaagatggcggatcagcgcatggcgtattcctcctgaattccaacgcaatggacgttgttcttcagccatctcctgctttgagttggagatctacaggcgggatactggacgtctacatctttctgggtccagagcctaaatccgtagtgcagcagtatcttgatgtcgtcggatacccgtttatgccaccatattggggcctggggttccacttgtgccgctggggatattcatccaccgccattacacgacaagttgttgagaatatgaccagggcacattttcctctggatgtacagtggaacgacctggactacatggatagtcgccgcgacttcaccttcaataaggatgggttcagagactttcctgctatggtccaagaacttcaccagggaggcaggaggtacatgatgatcgtagatccgggaatttcttcttctggcccagccggttcatacagaccgtatgacgaaggactgcgacgaggcgtctttatcacgaacgagactggtcagcctttgataggcaaggtttggccagggtccaccgctttcccggatttcacaaatcctgaggcactggcctggtgggaagatatggtcgccgagtttcacgaccaggtcccatttgacgggatgtggatcgacatgaacgagccatccaacttcattagaggaagttatgatggctgtccgaataatgagctggaaaaccctccttacgtaccaggcgttgttggtgggactcttcaagctgcgacgatttgcgcatcctcccatcagttcctgtcaacccactataacttgcacaatctgtacgggacaacagaggctatcgccagtcatagggccctggtaaaagctagaggaacacgccctttcgttatctctcgctcaacttttgcaggccacggtaggtatgccggacattggaccggcgacgtctggagttcttgggaacagctggcttcctccgttccagagatattgcagtttaacctgttgggagtcccacttgtaggtgcagatgtttgtggcttcctggggaacacctcagaagaattgtgcgtaagatggactcaactgggcgccttctacccttttatgcgcaatcacaactcactgacatctttgcctcaagaaccgtactcatttagtgagccagcacagcaggccatgaggaaggctcttggcctgagatatgcacttctgccgcatctgtacacccttttccaccaggctcatgtccatggagagactgttgcacgacctctgttcttggagttcccaaaagactcttccacgtggacagtcgatcaccagatgctgtggggcgaggctctgctgattacacctgtattgcaacctggtaaggccgaagttaccgggtactttccattggggacctggtatgatctgcaaacagtcccggttgaagctcttggaagtcttccacctccacctgctgcaccaagggagcctgcgatccactctgaaggacagtgggtaactttgcctgcaccgctggacaccatcaatgtccatctgcgcgaaggctacatcataccacttcaaggtcctggactgaccactacagagtctagaaaacaaccaatggctcttgctgttgcactgactaaaagcggcgaagcaaggggtgagctgttctgggacgacggagagtcactggaggtactcgaacgaggcgcgtatacgcaggtcatttttgaggctcgcaataatacgatcgttaacgagctggtccacgtcacttcagaaggtgcaggccttcagttgggcaaggtaactgtcctgggagttgctacagcaccgcagcaggtcttgtccaacggacggcccgtaagcaactttacctatagtcctgataccaaagttctggacatctgcgttgctctgctgatgggtgagcagttcctggtatcatggtgc

SEQ ID NO: 386 - protein, 944 aa, synthetic construct
  REGION 1..944: note = Variant of the Homo Sapiens Lysosomal alpha-glucosidase
MEWSWVFLFFLSVTTGVHSGHILWHDFSTVPRELSGSSQVLEETHPAHQVGASRPGPRDAQLHPGRPRAVPTQCDVPENSRFDCAPEKAITQEQCEARGCCYIPAKQGLQGAQMGQPWCFFPPSYPSYKLENLSQSEMGYTATLTRTTPSFFPKDILTLRLDVMMETENRLHFTIKDPANRRYEVPLETPHVHSRAPSPLYSVEFSEEPFGVIVRRQLDGRVLLNTTVAPLFFADQFLQLSTSLPSQYITGLAEHLSPLMLSTSWNKITLWNRDLAPTPGANLYGSHPFYLALEDGGSAHGVFLLNSNAMDVVLQPSPALSWRSTGGILDVYIFLGPEPKSVVQQYLDVVGYPFMPPYWGLGFHLCRWGYSSTAITRQVVENMTRAHFPLDVQWNDLDYMDSRRDFTFNKDGFRDFPAMVQELHQGGRRYMMIVDPGISSSGPAGSYRPYDEGLRRGVFITNETGQPLIGKVWPGSTAFPDFTNPEALAWWEDMVAEFHDQVPFDGMWIDMNEPSNFIRGSYDGCPNNELENPPYVPGVVGGTLQAATICASSHQFLSTHYNLHNLYGTTEAIASHRALVKARGTRPFVISRSTFAGHGRYAGHWTGDVWSSWEQLASSVPEILQFNLLGVPLVGADVCGFLGNTSEELCVRWTQLGAFYPFMRNHNSLTSLPQEPYSFSEPAQQAMRKALGLRYALLPHLYTLFHQAHVHGETVARPLFLEFPKDSSTWTVDHQMLWGEALLITPVLQPGKAEVTGYFPLGTWYDLQTVPVEALGSLPPPPAAPREPAIHSEGQWVTLPAPLDTINVHLREGYIIPLQGPGLTTTESRKQPMALAVALTKSGEARGELFWDDGESLEVLERGAYTQVIFEARNNTIVNELVHVTSEGAGLQLGKVTVLGVATAPQQVLSNGRPVSNFTYSPDTKVLDICVALLMGEQFLVSWC

SEQ ID NO: 387 - DNA, 2832 bp, synthetic construct
  misc_feature 1..2832: note = Variant of the Homo Sapiens Lysosomal alpha-glucosidase
  source 1..2832: mol_type = other DNA
atggaatggagctgggtctttctcttcttcctgtcagtaacgactggtgtccactccggacacattctgtggcatgatttttctaccgtgcctagagagctttccggttcaagtcaagtcctcgaagaaacacatccagcccatcaggttggcgcatctaggccgggccctcgggacgctcaactccacccagggagacctagggccgttcccactcagtgcgacgtgccagagaactcacgcttcgattgtgcacctgagaaggctatcacgcaagagcagtgcgaggcccgcggatgttgttacataccggctaaacaggggctgcagggtgcgcagatgggccaaccttggtgcttcttcccaccatcctatccgagttacaagctggagaatctctcccagtctgaaatgggatataccgcaacactgactcggaccaccccctccttctttcccaaagatatcttgactctgagacttgacgtaatgatggagacagaaaacaggctccactttaccattaaggaccctgccaatcgccgatacgaggtgcctctggaaacaccacacgtgcacagtagagctccatcacctctgtattctgtcgagttctccgaagagccgtttggcgttatcgtcaggaggcagctcgacgggcgagtgcttctgaacacgactgtggccccgttgttctttgcggatcagtttctgcaactgtcaacaagtctcccttctcagtacattaccgggcttgcagagcatctgtccccactcatgctgagtacttcatggaacaaaatcacactgtggaatagagaccttgctcctactccaggagccaacttgtatggttctcaccctttctacttggccctggaagatggcggatcagcgcatggcgtattcctcctgaattccaacgcaatggacgttgttcttcagccatctcctgctttgagttggagatctacaggcgggatactggacgtctacatctttctgggtccagagcctaaatccgtagtgcagcagtatcttgatgtcgtcggatacccgtttatgccaccatattggggcctggggttccacttgtgccgctggggatattcatccaccgccattacacgacaagttgttgagaatatgaccagggcacattttcctctggatgtacagtggaacgacctggactacatggatagtcgccgcgacttcaccttcaataaggatgggttcagagactttcctgctatggtccaagaacttcaccagggaggcaggaggtacatgatgatcgtagatccggctatttcttcttctggcccagccggttcatacagaccgtatgacgaaggactgcgacgaggcgtctttatcacgaacgagactggtcagcctttgataggcaaggtttggccagggtccaccgctttcccggatttcacaaatcctgaggcactggcctggtgggaagatatggtcgccgagtttcacgaccaggtcccatttgacgggatgtggatcgacatgaacgagccatccaacttcattagaggaagtgtggatggctgtccgaataatgagctggaaaaccctccttacgtaccaggcgttgttggtgggactcttcaagctgcgacgatttgcgcatcctcccatcagttcctgtcaacccactataacttgcacaatctgtacgggacaacagaggctatcgccagtcatagggccctggtaaaagctagaggaacacgccctttcgttatctctcgctcaacttttgcaggccacggtaggtatgccggacattggaccggcgacgtctggagttcttgggaacagctggcttcctccgttccagagatattgcagtttaacctgttgggagtcccacttgtaggtgcagatgtttgtggcttcctggggaacacctcagaagaattgtgcgtaagatggactcaactgggcgccttctacccttttatgcgcaatcacaactcactgacatctttgcctcaagaaccgtactcatttagtgagccagcacagcaggccatgaggaaggctcttggcctgagatatgcacttctgccgcatctgtacacccttttccaccaggctcatgtccatggagagactgttgcacgacctctgttcttggagttcccaaaagactcttccacgtggacagtcgatcaccagatgctgtggggcgaggctctgctgattacacctgtattgcaacctggtaaggccgaagttaccgggtactttccattggggacctggtatgatctgcaaacagtcccggttgaagctcttggaagtcttccacctccacctgctgcaccaagggagcctgcgatccactctgaaggacagtgggtaactttgcctgcaccgctggacaccatcaatgtccatctgcgcgaaggctacatcataccacttcaaggtcctggactgaccactacagagtctagaaaacaaccaatggctcttgctgttgcactgactaaaagcggcgaagcaaggggtgagctgttctgggacgacggagagtcactggaggtactcgaacgaggcgcgtatacgcaggtcatttttgaggctcgcaataatacgatcgttaacgagctggtccacgtcacttcagaaggtgcaggccttcagttgggcaaggtaactgtcctgggagttgctacagcaccgcagcaggtcttgtccaacggacggcccgtaagcaactttacctatagtcctgataccaaagttctggacatctgcgttgctctgctgatgggtgagcagttcctggtatcatggtgc

SEQ ID NO: 388 - protein, 944 aa, synthetic construct
  REGION 1..944: note = Variant of the Homo Sapiens Lysosomal alpha-glucosidase
MEWSWVFLFFLSVTTGVHSGHILWHDFSTVPRELSGSSQVLEETHPAHQVGASRPGPRDAQLHPGRPRAVPTQCDVPENSRFDCAPEKAITQEQCEARGCCYIPAKQGLQGAQMGQPWCFFPPSYPSYKLENLSQSEMGYTATLTRTTPSFFPKDILTLRLDVMMETENRLHFTIKDPANRRYEVPLETPHVHSRAPSPLYSVEFSEEPFGVIVRRQLDGRVLLNTTVAPLFFADQFLQLSTSLPSQYITGLAEHLSPLMLSTSWNKITLWNRDLAPTPGANLYGSHPFYLALEDGGSAHGVFLLNSNAMDVVLQPSPALSWRSTGGILDVYIFLGPEPKSVVQQYLDVVGYPFMPPYWGLGFHLCRWGYSSTAITRQVVENMTRAHFPLDVQWNDLDYMDSRRDFTFNKDGFRDFPAMVQELHQGGRRYMMIVDPAISSSGPAGSYRPYDEGLRRGVFITNETGQPLIGKVWPGSTAFPDFTNPEALAWWEDMVAEFHDQVPFDGMWIDMNEPSNFIRGSVDGCPNNELENPPYVPGVVGGTLQAATICASSHQFLSTHYNLHNLYGTTEAIASHRALVKARGTRPFVISRSTFAGHGRYAGHWTGDVWSSWEQLASSVPEILQFNLLGVPLVGADVCGFLGNTSEELCVRWTQLGAFYPFMRNHNSLTSLPQEPYSFSEPAQQAMRKALGLRYALLPHLYTLFHQAHVHGETVARPLFLEFPKDSSTWTVDHQMLWGEALLITPVLQPGKAEVTGYFPLGTWYDLQTVPVEALGSLPPPPAAPREPAIHSEGQWVTLPAPLDTINVHLREGYIIPLQGPGLTTTESRKQPMALAVALTKSGEARGELFWDDGESLEVLERGAYTQVIFEARNNTIVNELVHVTSEGAGLQLGKVTVLGVATAPQQVLSNGRPVSNFTYSPDTKVLDICVALLMGEQFLVSWC

SEQ ID NO: 389 - DNA, 2832 bp, synthetic construct
  misc_feature 1..2832: note = Variant of the Homo Sapiens Lysosomal alpha-glucosidase
  source 1..2832: mol_type = other DNA
atggaatggagctgggtctttctcttcttcctgtcagtaacgactggtgtccactccggacacattctgtggcatgatttttctaccgtgcctagagagctttccggttcaagtcaagtcctcgaagaaacacatccagcccatcaggttggcgcatctaggccgggccctcgggacgctcaactccacccagggagacctagggccgttcccactcagtgcgacgtgccagagaactcacgcttcgattgtgcacctgagaaggctatcacgcaagagcagtgcgaggcccgcggatgttgttacataccggctaaacaggggctgcagggtgcgcagatgggccaaccttggtgcttcttcccaccatcctatccgagttacaagctggagaatctctcccagtctgaaatgggatataccgcaacactgactcggaccaccccctccttctttcccaaagatatcttgactctgagacttgacgtaatgatggagacagaaaacaggctccactttaccattaaggaccctgccaatcgccgatacgaggtgcctctggaaacaccacacgtgcacagtagagctccatcacctctgtattctgtcgagttctccgaagagccgtttggcgttatcgtcaggaggcagctcgacgggcgagtgcttctgaacacgactgtggccccgttgttctttgcggatcagtttctgcaactgtcaacaagtctcccttctcagtacattaccgggcttgcagagcatctgtccccactcatgctgagtacttcatggaacaaaatcacactgtggaatagagaccttgctcctactccaggagccaacttgtatggttctcaccctttctacttggccctggaagatggcggatcagcgcatggcgtattcctcctgaattccaacgcaatggacgttgttcttcagccatctcctgctttgagttggagatctacaggcgggatactggacgtctacatctttctgggtccagagcctaaatccgtagtgcagcagtatcttgatgtcgtcggatacccgtttatgccaccatattggggcctggggttccacttgtgccgctggggatattcatccaccgccattacacgacaagttgttgagaatatgaccagggcacattttcctctggatgtacagtggaacgacctggactacatggatagtcgccgcgacttcaccttcaataaggatgggttcagagactttcctgctatggtccaagaacttcaccagggaggcaggaggtacatgatgatcgtagatccgggaatttcttcttctggcccagccggttcatacagaccgtatgacgaaggactgcgacgaggcgtctttatcacgaacgagactggtcagcctttgataggcaaggtttggccagggtccaccgctttcccggatttcacaaatcctgaggcactggcctggtgggaagatatggtcgccgagtttcacgaccaggtcccatttgacgggatgtggatcgacatgaacgagccatccaacttcattagaggaagtgtggatggctgtccgaataatgagctggaaaaccctccttacgtaccaggcgttgttggtgggactcttcaagctgcgacgatttgcgcatcctcccatcagttcctgtcaacccactataacttgcacaatctgtacgggacaacagaggctatcgccagtcatagggccctggtaaaagctagaggaacacgccctttcgttatctctcgctcaacttttgcaggccacggtaggtatgccggacattggaccggcgacgtctggagttcttgggaacagctggcttcctccgttccagagatattgcagtttaacctgttgggagtcccacttgtaggtgcagatgtttgtggcttcctggggaacacctcagaagaattgtgcgtaagatggactcaactgggcgccttctacccttttatgcgcaatcacaactcactgacatctttgcctcaagaaccgtactcatttagtgagccagcacagcaggccatgaggaaggctcttggcctgagatatgcacttctgccgcatctgtacacccttttccaccaggctcatgtccatggagagactgttgcacgacctctgttcttggagttcccaaaagactcttccacgtggacagtcgatcaccagtttctgtggggcgaggctctgctgattacacctgtattgcaacctggtaaggccgaagttaccgggtactttccattggggacctggtatgatctgcaaacagtcccggttgaagctcttggaagtcttccacctccacctgctgcaccaagggagcctgcgatccactctgaaggacagtgggtaactttgcctgcaccgctggacaccatcaatgtccatctgcgcgaaggctacatcataccacttcaaggtcctggactgaccactacagagtctagaaaacaaccaatggctcttgctgttgcactgactaaaagcggcgaagcaaggggtgagctgttctgggacgacggagagtcactggaggtactcgaacgaggcgcgtatacgcaggtcatttttgaggctcgcaataatacgatcgttaacgagctggtccacgtcacttcagaaggtgcaggccttcagttgggcaaggtaactgtcctgggagttgctacagcaccgcagcaggtcttgtccaacggacggcccgtaagcaactttacctatagtcctgataccaaagttctggacatctgcgttgctctgctgatgggtgagcagttcctggtatcatggtgc

SEQ ID NO: 390 - protein, 944 aa, synthetic construct
  REGION 1..944: note = Variant of the Homo Sapiens Lysosomal alpha-glucosidase
MEWSWVFLFFLSVTTGVHSGHILWHDFSTVPRELSGSSQVLEETHPAHQVGASRPGPRDAQLHPGRPRAVPTQCDVPENSRFDCAPEKAITQEQCEARGCCYIPAKQGLQGAQMGQPWCFFPPSYPSYKLENLSQSEMGYTATLTRTTPSFFPKDILTLRLDVMMETENRLHFTIKDPANRRYEVPLETPHVHSRAPSPLYSVEFSEEPFGVIVRRQLDGRVLLNTTVAPLFFADQFLQLSTSLPSQYITGLAEHLSPLMLSTSWNKITLWNRDLAPTPGANLYGSHPFYLALEDGGSAHGVFLLNSNAMDVVLQPSPALSWRSTGGILDVYIFLGPEPKSVVQQYLDVVGYPFMPPYWGLGFHLCRWGYSSTAITRQVVENMTRAHFPLDVQWNDLDYMDSRRDFTFNKDGFRDFPAMVQELHQGGRRYMMIVDPGISSSGPAGSYRPYDEGLRRGVFITNETGQPLIGKVWPGSTAFPDFTNPEALAWWEDMVAEFHDQVPFDGMWIDMNEPSNFIRGSVDGCPNNELENPPYVPGVVGGTLQAATICASSHQFLSTHYNLHNLYGTTEAIASHRALVKARGTRPFVISRSTFAGHGRYAGHWTGDVWSSWEQLASSVPEILQFNLLGVPLVGADVCGFLGNTSEELCVRWTQLGAFYPFMRNHNSLTSLPQEPYSFSEPAQQAMRKALGLRYALLPHLYTLFHQAHVHGETVARPLFLEFPKDSSTWTVDHQFLWGEALLITPVLQPGKAEVTGYFPLGTWYDLQTVPVEALGSLPPPPAAPREPAIHSEGQWVTLPAPLDTINVHLREGYIIPLQGPGLTTTESRKQPMALAVALTKSGEARGELFWDDGESLEVLERGAYTQVIFEARNNTIVNELVHVTSEGAGLQLGKVTVLGVATAPQQVLSNGRPVSNFTYSPDTKVLDICVALLMGEQFLVSWC

SEQ ID NO: 391 - DNA, 2832 bp, synthetic construct
  misc_feature 1..2832: note = Variant of the Homo Sapiens Lysosomal alpha-glucosidase
  source 1..2832: mol_type = other DNA
atggaatggagctgggtctttctcttcttcctgtcagtaacgactggtgtccactccggacacattctgtggcatgatttttctaccgtgcctagagagctttccggttcaagtcaagtcctcgaagaaacacatccagcccatcaggttggcgcatctaggccgggccctcgggacgctcaactccacccagggagacctagggccgttcccactcagtgcgacgtgccagagaactcacgcttcgattgtgcacctgagaaggctatcacgcaagagcagtgcgaggcccgcggatgttgttacataccggctaaacaggggctgcagggtgcgcagatgggccaaccttggtgcttcttcccaccatcctatccgagttacaagctggagaatctctcccagtctgaaatgggatataccgcaacactgactcggaccaccccctccttctttcccaaagatatcttgactctgagacttgacgtaatgatggagacagaaaacaggctccactttaccattaaggaccctgccaatcgccgatacgaggtgcctctggaaacaccacacgtgcacagtagagctccatcacctctgtattctgtcgagttctccgaagagccgtttggcgttatcgtcaggaggcagctcgacgggcgagtgcttctgaacacgactgtggccccgttgttctttgcggatcagtttctgcaactgtcaacaagtctcccttctcagtacattaccgggcttgcagagcatctgtccccactcatgctgagtacttcatggaacaaaatcacactgtggaatagagaccttgctcctactccaggagccaacttgtatggttctcaccctttctacttggccctggaagatggcggatcagcgcatggcgtattcctcctgaattccaacgcaatggacgttgttcttcagccatctcctgctttgagttggagatctacaggcgggatactggacgtctacatctttctgggtccagagcctaaatccgtagtgcagcagtatcttgatgtcgtcggatacccgtttatgccaccatattggggcctggggttccacttgtgccgctggggatattcatccaccgccattacacgacaagttgttgagaatatgaccagggcacattttcctctggatgtacagtggaacgacctggactacatggatagtcgccgcgacttcaccttcaataaggatgggttcagagactttcctgctatggtccaagaacttcaccagggaggcaggaggtacatgatgatcgtagatccgggaatttcttcttctggcccagccggttcatacagaccgtatgacgaaggactgcgacgaggcgtctttatcacgaacgagactggtcagcctttgataggcaaggtttggccagggtccaccgctttcccggatttcacaaatcctgaggcactggcctggtgggaagatatggtcgccgagtttcacgaccaggtcccatttgacgggatgtggatcgacatgaacgagccatccaacttcattagaggaagtgtggatggctgtccgaataatgagctggaaaaccctccttacgtaccaggcgttgttggtgggactcttcaagctgcgacgatttgcgcatcctcccatcagttcctgtcaacccactataacttgcacaatctgtacgggacaacagaggctatcgccagtcatagggccctggtaaaagctagaggaacacgccctttcgttatctctcgctcaacttttgcaggccacggtaggtatgccggacattggaccggcgacgtctggagttcttgggaacagctggcttcctccgttccagagatattgcagtttaacctgttgggagtcccacttgtaggtgcagatgtttgtggcttcctggggaacacctcagaagaattgtgcgtaagatggactcaactgggcgccttctacccttttatgcgcaatcacaactcactgacatctttgcctcaagaaccgtactcatttagtgagccagcacagcaggccatgaggaaggctcttggcctgagatatgcacttctgccgcatctgtacacccttttccaccaggctcatgtccatggagagactgttgcacgacctctgttcttggagttcccaaaagactcttccacgtggacagtcgatcaccagatgctgtggggcgaggctctgctgattacacctgtattgcaacctggtaaggccgaagttaccgggtactttccattggggacctggtatgatctgcaaacagtcccggttgaagctcttggaagtcttccacctccacctgctgcaccaagggagcctgcgatccactctgaaggacagtgggtaactttgcctgcaccgctggacaccatcaatgtccatctgcgcgaaggctacatcataccacttcaaggtcctggactgaccactacagagtctagaaaacaaccaatggctcttgctgttgcactgactaaaagcggcgaagcaaggggtgagctgttctgggacgacggagagtcactggaggtactcgaacgaggcgcgtatacgcaggtcatttttgaggctcgcaataatacgatcgttaacgagctggtccacgtcacttcagaaggtgcaggccttcagttgggcaaggtaactgtcctgggagttgctacagcaccgcagcaggtcttgtccaacggacggcccgtaagcaactttacctatagtcctgataccaaagttctggacatctgcgttacgctgctgatgggtgagcagttcctggtatcatggtgc

SEQ ID NO: 392 - protein, 944 aa, synthetic construct
  REGION 1..944: note = Variant of the Homo Sapiens Lysosomal alpha-glucosidase
MEWSWVFLFFLSVTTGVHSGHILWHDFSTVPRELSGSSQVLEETHPAHQVGASRPGPRDAQLHPGRPRAVPTQCDVPENSRFDCAPEKAITQEQCEARGCCYIPAKQGLQGAQMGQPWCFFPPSYPSYKLENLSQSEMGYTATLTRTTPSFFPKDILTLRLDVMMETENRLHFTIKDPANRRYEVPLETPHVHSRAPSPLYSVEFSEEPFGVIVRRQLDGRVLLNTTVAPLFFADQFLQLSTSLPSQYITGLAEHLSPLMLSTSWNKITLWNRDLAPTPGANLYGSHPFYLALEDGGSAHGVFLLNSNAMDVVLQPSPALSWRSTGGILDVYIFLGPEPKSVVQQYLDVVGYPFMPPYWGLGFHLCRWGYSSTAITRQVVENMTRAHFPLDVQWNDLDYMDSRRDFTFNKDGFRDFPAMVQELHQGGRRYMMIVDPGISSSGPAGSYRPYDEGLRRGVFITNETGQPLIGKVWPGSTAFPDFTNPEALAWWEDMVAEFHDQVPFDGMWIDMNEPSNFIRGSVDGCPNNELENPPYVPGVVGGTLQAATICASSHQFLSTHYNLHNLYGTTEAIASHRALVKARGTRPFVISRSTFAGHGRYAGHWTGDVWSSWEQLASSVPEILQFNLLGVPLVGADVCGFLGNTSEELCVRWTQLGAFYPFMRNHNSLTSLPQEPYSFSEPAQQAMRKALGLRYALLPHLYTLFHQAHVHGETVARPLFLEFPKDSSTWTVDHQMLWGEALLITPVLQPGKAEVTGYFPLGTWYDLQTVPVEALGSLPPPPAAPREPAIHSEGQWVTLPAPLDTINVHLREGYIIPLQGPGLTTTESRKQPMALAVALTKSGEARGELFWDDGESLEVLERGAYTQVIFEARNNTIVNELVHVTSEGAGLQLGKVTVLGVATAPQQVLSNGRPVSNFTYSPDTKVLDICVTLLMGEQFLVSWC

SEQ ID NO: 393 - DNA, 2832 bp, synthetic construct
  misc_feature 1..2832: note = Variant of the Homo Sapiens Lysosomal alpha-glucosidase
  source 1..2832: mol_type = other DNA
atggaatggagctgggtctttctcttcttcctgtcagtaacgactggtgtccactccggacacattctggggcatgatttttctaccgtgcctagagagctttccggttcaagtcaagtcctcgaagaaacacatccagcccatcaggttggcgcatctaggccgggccctcgggacgctcaactccacccagggagacctagggccgttcccactcagtgcgacgtgccagagaactcacgcttcgattgtgcacctgagaaggctatcacgcaagagcagtgcgaggcccgcggatgttgttacataccggctaaacaggggctgcagggtgcgcagatgggccaaccttggtgcttcttcccaccatcctatccgagttacaagctggagaatctctcccagtctgaaatgggatataccgcaacactgactcggaccaccccctccttctttcccaaagatatcttgactctgagacttgacgtaatgatggagacagaaaacaggctccactttaccattaaggaccctgccaatcgccgatacgaggtgcctctggaaacaccacacgtgcacagtagagctccatcacctctgtattctgtcgagttctccgaagagccgtttggcgttatcgtcaggaggcagctcgacgggcgagtgcttctgaacacgactgtggccccgttgttctttgcggatcagtttctgcaactgtcaacaagtctcccttctcagtacattaccgggcttgcagagcatctgtccccactcatgctgagtacttcatggaacaaaatcacactgtggaatagagaccttgctcctactccaggagccaacttgtatggttctcaccctttctacttggccctggaagatggcggatcagcgcatggcgtattcctcctgaattccaacgcaatggacgttgttcttcagccatctcctgctttgagttggagatctacaggcgggatactggacgtctacatctttctgggtccagagcctaaatccgtagtgcagcagtatcttgatgtcgtcggatacccgtttatgccaccatattggggcctggggttccacttgtgccgctggggatattcatccaccgccattacacgacaagttgttgagaatatgaccagggcacattttcctctggatgtacagtggaacgacctggactacatggatagtcgccgcgacttcaccttcaataaggatgggttcagagactttcctgctatggtccaagaacttcaccagggaggcaggaggtacatgatgatcgtagatccgggaatttcttcttctggcccagccggttcatacagaccgtatgacgaaggactgcgacgaggcgtctttatcacgaacgagactggtcagcctttgataggcaaggtttggccagggtccaccgctttcccggatttcacaaatcctgaggcactggcctggtgggaagatatggtcgccgagtttcacgaccaggtcccatttgacgggatgtggatcgacatgaacgagccatccaacttcattagaggaagtgtggatggctgtccgaataatgagctggaaaaccctccttacgtaccaggcgttgttggtgggactcttcaagctgcgacgatttgcgcatcctcccatcagttcctgtcaacccactataacttgcacaatctgtacgggacaacagaggctatcgccagtcatagggccctggtaaaagctagaggaacacgccctttcgttatctctcgctcaacttttgcaggccacggtaggtatgccggacattggaccggcgacgtctggagttcttgggaacagctggcttcctccgttccagagatattgcagtttaacctgttgggagtcccacttgtaggtgcagatgtttgtggcttcctggggaacacctcagaagaattgtgcgtaagatggactcaactgggcgccttctacccttttatgcgcaatcacaactcactgacatctttgcctcaagaaccgtactcatttagtgagccagcacagcaggccatgaggaaggctcttggcctgagatatgcacttctgccgcatctgtacacccttttccaccaggctcatgtccatggagagactgttgcacgacctctgttcttggagttcccaaaagactcttccacgtggacagtcgatcaccagatgctgtggggcgaggctctgctgattacacctgtattgcaacctggtaaggccgaagttaccgggtactttccattggggacctggtatgatctgcaaacagtcccggttgaagctcttggaagtcttccacctccacctgctgcaccaagggagcctgcgatccactctgaaggacagtgggtaactttgcctgcaccgctggacaccatcaatgtccatctgcgcgaaggctacatcataccacttcaaggtcctggactgaccactacagagtctagaaaacaaccaatggctcttgctgttgcactgactaaaagcggcgaagcaaggggtgagctgttctgggacgacggagagtcactggaggtactcgaacgaggcgcgtatacgcaggtcatttttgaggctcgcaataatacgatcgttaacgagctggtccacgtcacttcagaaggtgcaggccttcagttgggcaaggtaactgtcctgggagttgctacagcaccgcagcaggtcttgtccaacggacggcccgtaagcaactttacctatagtcctgataccaaagttctggacatctgcgttgctctgctgatgggtgagcagttcctggtatcatggtgc

SEQ ID NO: 394 - protein, 944 aa, synthetic construct
  REGION 1..944: note = Variant of the Homo Sapiens Lysosomal alpha-glucosidase
MEWSWVFLFFLSVTTGVHSGHILGHDFSTVPRELSGSSQVLEETHPAHQVGASRPGPRDAQLHPGRPRAVPTQCDVPENSRFDCAPEKAITQEQCEARGCCYIPAKQGLQGAQMGQPWCFFPPSYPSYKLENLSQSEMGYTATLTRTTPSFFPKDILTLRLDVMMETENRLHFTIKDPANRRYEVPLETPHVHSRAPSPLYSVEFSEEPFGVIVRRQLDGRVLLNTTVAPLFFADQFLQLSTSLPSQYITGLAEHLSPLMLSTSWNKITLWNRDLAPTPGANLYGSHPFYLALEDGGSAHGVFLLNSNAMDVVLQPSPALSWRSTGGILDVYIFLGPEPKSVVQQYLDVVGYPFMPPYWGLGFHLCRWGYSSTAITRQVVENMTRAHFPLDVQWNDLDYMDSRRDFTFNKDGFRDFPAMVQELHQGGRRYMMIVDPGISSSGPAGSYRPYDEGLRRGVFITNETGQPLIGKVWPGSTAFPDFTNPEALAWWEDMVAEFHDQVPFDGMWIDMNEPSNFIRGSVDGCPNNELENPPYVPGVVGGTLQAATICASSHQFLSTHYNLHNLYGTTEAIASHRALVKARGTRPFVISRSTFAGHGRYAGHWTGDVWSSWEQLASSVPEILQFNLLGVPLVGADVCGFLGNTSEELCVRWTQLGAFYPFMRNHNSLTSLPQEPYSFSEPAQQAMRKALGLRYALLPHLYTLFHQAHVHGETVARPLFLEFPKDSSTWTVDHQMLWGEALLITPVLQPGKAEVTGYFPLGTWYDLQTVPVEALGSLPPPPAAPREPAIHSEGQWVTLPAPLDTINVHLREGYIIPLQGPGLTTTESRKQPMALAVALTKSGEARGELFWDDGESLEVLERGAYTQVIFEARNNTIVNELVHVTSEGAGLQLGKVTVLGVATAPQQVLSNGRPVSNFTYSPDTKVLDICVALLMGEQFLVSWC

SEQ ID NO: 395 - DNA, 2832 bp, synthetic construct
  misc_feature 1..2832: note = Variant of the Homo Sapiens Lysosomal alpha-glucosidase
  source 1..2832: mol_type = other DNA
atggaatggagctgggtctttctcttcttcctgtcagtaacgactggtgtccactccggacacattctgtggcatgatttttctaccgtgcctagagagctttccggttcaagtcaagtcctcgaagaaacacatccagcccatcaggttggcgcatctaggccgggccctcgggacgctcaactccacccagggagacctagggccgttcccactcagtgcgacgtgccagagaactcacgcttcgattgtgcacctgagaaggctatcacgcaagagcagtgcgaggcccgcggatgttgttacataccggctaaacaggggctgcagggtgcgcagatgggccaaccttggtgcttcttcccaccatcctatccgagttacaagctggagaatctctcccagtctgaaatgggatataccgcaacactgactcggaccaccccctccttctttcccaaagatatcttgactctgagacttgacgtaatgatggagacagaaaacaggctccactttaccattaaggaccctgccaatcgccgatacgaggtgcctctggaaacaccacacgtgcacagtagagctccatcacctctgtattctgtcgagttctccgaagagccgtttggcgttatcgtcaggaggcagctcgacgggcgagtgcttctgaacacgactgtggccccgttgttctttgcggatcagtttctgcaactgtcaacaagtctcccttctcagtacattaccgggcttgcagagcatctgtccccactcatgctgagtacttcatggaacaaaatcacactgtggaatagagaccttgctcctactccaggagccaacttgtatggttctcaccctttctacttggccctggaagatggcggatcagcgcatggcgtattcctcctgaattccaacgcaatggacgttgttcttcagccatctcctgctttgagttggagatctacaggcgggatactggacgtctacatctttctgggtccagagcctaaatccgtagtgcagcagtatcttgatgtcgtcggatacccgtttatgccaccatattggggcctggggttccacttgtgccgctggggatattcatccaccgccattacacgacaagttgttgagaatatgaccagggcacattttcctctggatgtacagtggaacgacctggactacatggatagtcgccgcgacttcaccttcaataaggatgggttcagagactttcctgctatggtccaagaacttcaccagggaggcaggaggtacatgatgatcgtagatccgggaatttcttcttctggcccagccggttcatacagaccgtatgacgaaggactgcgacgaggcgtctttatcacgaacgagactggtcagcctttgataggcaaggtttggccagggtccaccgctttcccggatttcacaaatcctgaggcactggcctggtgggaagatatggtcgccgagtttcacgaccaggtcccatttgacgggatgtggatcgacatgaacgagccatccaacttcattagaggaagtgtggatggctgtccgaataatgagctggaaaaccctccttacgtaccaggcgttgttggtgggactcttcaagctgcgacgatttgcgcatcctcccatcagttcctgtcaacccactataacttgcacaatctgtacgggacaacagaggctatcgccagtcatagggccctggtaaaagctagaggaacacgccctttcgttatctctcgctcaacttttgcaggccacggtaggtatgccggacattggaccggcgacgtctggagttcttgggaacagctggcttcctccgttccagagatattgcagtttaacctgttgggagtcccacttgtaggtgcagatgtttgtggcttcctggggaacacctcagaagaattgtgcgtaagatggactcaactgggcgccttctacccttttatgcgcaatcacaactcactgacatctttgcctcaagaaccgtactcatttagtgagccagcacagcaggccatgaggaaggctcttggcctgagatatgcacttctgccgcatctgtacacccttttccaccaggctcatgtccatggagagactgttgcacgacctctgttcttggagttcccaaaagactcttccacgtggacagtcgatcaccagatgctgtggggcgaggctctgctgattacacctgtattgcaacctggtaaggccgaagttaccgggtactttccattggggacctggtatgatctgcaaacagtcccggttgaagctcttggaagtcttccacctccacctgctgcaccaagggagcctgcgatccactctgaaggacagtgggtaactttgcctgcaccgctggacaccatcaatgtccatctgcgcgaaggctacatcataccacttcaaggtcctggactgaccactacagagtctagaaaacaaccaatggctcttgctgttgcactgactaaaaagggcgaagcaaggggtgagctgttctgggacgacggagagtcactggaggtactcgaacgaggcgcgtatacgcaggtcatttttgaggctcgcaataatacgatcgttaacgagctggtccacgtcacttcagaaggtgcaggccttcagttgggcaaggtaactgtcctgggagttgctacagcaccgcagcaggtcttgtccaacggacggcccgtaagcaactttacctatagtcctgataccaaagttctggacatctgcgttgctctgctgatgggtgagcagttcctggtatcatggtgc

SEQ ID NO: 396 - protein, 944 aa, synthetic construct
  REGION 1..944: note = Variant of the Homo Sapiens Lysosomal alpha-glucosidase
MEWSWVFLFFLSVTTGVHSGHILWHDFSTVPRELSGSSQVLEETHPAHQVGASRPGPRDAQLHPGRPRAVPTQCDVPENSRFDCAPEKAITQEQCEARGCCYIPAKQGLQGAQMGQPWCFFPPSYPSYKLENLSQSEMGYTATLTRTTPSFFPKDILTLRLDVMMETENRLHFTIKDPANRRYEVPLETPHVHSRAPSPLYSVEFSEEPFGVIVRRQLDGRVLLNTTVAPLFFADQFLQLSTSLPSQYITGLAEHLSPLMLSTSWNKITLWNRDLAPTPGANLYGSHPFYLALEDGGSAHGVFLLNSNAMDVVLQPSPALSWRSTGGILDVYIFLGPEPKSVVQQYLDVVGYPFMPPYWGLGFHLCRWGYSSTAITRQVVENMTRAHFPLDVQWNDLDYMDSRRDFTFNKDGFRDFPAMVQELHQGGRRYMMIVDPGISSSGPAGSYRPYDEGLRRGVFITNETGQPLIGKVWPGSTAFPDFTNPEALAWWEDMVAEFHDQVPFDGMWIDMNEPSNFIRGSVDGCPNNELENPPYVPGVVGGTLQAATICASSHQFLSTHYNLHNLYGTTEAIASHRALVKARGTRPFVISRSTFAGHGRYAGHWTGDVWSSWEQLASSVPEILQFNLLGVPLVGADVCGFLGNTSEELCVRWTQLGAFYPFMRNHNSLTSLPQEPYSFSEPAQQAMRKALGLRYALLPHLYTLFHQAHVHGETVARPLFLEFPKDSSTWTVDHQMLWGEALLITPVLQPGKAEVTGYFPLGTWYDLQTVPVEALGSLPPPPAAPREPAIHSEGQWVTLPAPLDTINVHLREGYIIPLQGPGLTTTESRKQPMALAVALTKKGEARGELFWDDGESLEVLERGAYTQVIFEARNNTIVNELVHVTSEGAGLQLGKVTVLGVATAPQQVLSNGRPVSNFTYSPDTKVLDICVALLMGEQFLVSWC

SEQ ID NO: 397 - DNA, 2832 bp, synthetic construct
  misc_feature 1..2832: note = Variant of the Homo Sapiens Lysosomal alpha-glucosidase
  source 1..2832: mol_type = other DNA
atggaatggagctgggtctttctcttcttcctgtcagtaacgactggtgtccactccggacacattctgtggcatgatttttctaccgtgcctagagagctttccggttcaagtcaagtcctcgaagaaacacatccagcccatcaggttggcgcatctaggccgggccctcgggacgctcaactccacccagggagacctagggccgttcccactcagtgcgacgtgccagagaactcacgcttcgattgtgcacctgagaaggctatcacgcaagagcagtgcgaggcccgcggatgttgttacataccggctaaacaggggctgcagggtgcgcagatgggccaaccttggtgcttcttcccaccatcctatccgagttacaagctggagaatctctcccagtctgaaatgggatataccgcaacactgactcggaccaccccctccttctttcccaaagatatcttgactctgagacttgacgtaatgatggagacagaaaacaggctccactttaccattaaggaccctgccaatcgccgatacgaggtgcctctggaaacaccacacgtgcacagtagagctccatcacctctgtattctgtcgagttctccgaagagccgtttggcgttatcgtcaggaggcagctcgacgggcgagtgcttctgaacacgactgtggccccgttgttctttgcggatcagtttctgcaactgtcaacaagtctcccttctcagtacattaccgggcttgcagagcatctgtccccactcatgctgagtacttcatggaacaaaatcacactgtggaatagagaccttgctcctactccaggagccaacttgtatggttctcaccctttctacttggccctggaagatggcggatcagcgcatggcgtattcctcctgaattccaacgcaatggacgttgttcttcagccatctcctgctttgagttggagatctacaggcgggatactggacgtctacatctttctgggtccagagcctaaatccgtagtgcagcagtatcttgatgtcgtcggatacccgtttatgccaccatattggggcctggggttccacttgtgccgctggggatattcatccaccgccattacacgacaagttgttgagaatatgaccagggcacattttcctctggatgtacagtggaacgacctggactacatggatagtcgccgcgacttcaccttcaataaggatgggttcagagactttcctgctatggtccaagaacttcaccagggaggcaggaggtacatgatgatcgtagatccgggaatttcttcttctggcccagccggttcatacagaccgtatgacgaaggactgcgacgaggcgtctttatcacgaacgagactggtcagcctttgataggcaaggtttggccagggtccaccgctttcccggatttcacaaatcctgaggcactggcctggtgggaagatatggtcgccgagtttcacgaccaggtcccatttgacgggatgtggatcgacatgaacgagccatccaacttcattagaggaagtgtggatggctgtccgaataatgagctggaaaaccctccttacgtaccaggcgttgttggtgggactcttcaagctgcgacgatttgcgcatcctcccatcagttcctgtcaacccactataacttgcacaatctgtacgggacaacagaggctatcgccagtcatagggccctggtaaaagctagaggaacacgccctttcgttatctctcgctcaacttttgcaggccacggtaggtatgccggacattggaccggcgacgtctggagttcttgggaacagctggcttcctccgttccagagatattgcagtttaacctgttgggagtcccacttgtaggtgcagatgtttgtggcttcctggggaacacctcagaagaattgtgcgtaagatggactcaactgggcgccttctacccttttatgcgcaatcacaactcactgacatctttgcctcaagaaccgtactcatttagtgagccagcacagcaggccatgaggaaggctcttggcctgagatatgcacttctgccgcatctgtacacccttttccaccaggctcatgtccatggagagactgttgcacgacctctgttcttggagttcccaaaagactcttccacgtggacagtcgatcaccagatgctgtggggcgaggctctgctgattacacctgtattgcaacctggtaaggccgaagttaccgggtactttccattggggacctggtatgatctgcaaacagtcccggttgaagctcttggaagtcttccacctccacctgctgcaccaagggagcctgcgatccactctgaaggacagtgggtaactttgcctgcaccgctggacaccatcaatgtccatctgcgcgaaggctacatcataccacttcaaggtcctggactgaccactacagagtctagaaaacaaccaatggctcttgctgttgcactgactaaaagcggcgaagcaaggggtgagctgttctgggacgacggagagtcactggaggtactcgaacgaggcgcgtatacgcaggtcatttttgaggctcgcaataatacgatcgttaacgagctggtccacgtcacttcagaaggtgcaggccttcagttgggcaaggtaactgtcctgggagttgctacagcaccgcagcaggtcttgtccaacggacggcccgtaagcaactttacctatagtcctgataccaaagttctggacatctgcgtttggctgctgatgggtgagcagttcctggtatcatggtgc

SEQ ID NO: 398 - protein, 944 aa, synthetic construct
  REGION 1..944: note = Variant of the Homo Sapiens Lysosomal alpha-glucosidase
MEWSWVFLFFLSVTTGVHSGHILWHDFSTVPRELSGSSQVLEETHPAHQVGASRPGPRDAQLHPGRPRAVPTQCDVPENSRFDCAPEKAITQEQCEARGCCYIPAKQGLQGAQMGQPWCFFPPSYPSYKLENLSQSEMGYTATLTRTTPSFFPKDILTLRLDVMMETENRLHFTIKDPANRRYEVPLETPHVHSRAPSPLYSVEFSEEPFGVIVRRQLDGRVLLNTTVAPLFFADQFLQLSTSLPSQYITGLAEHLSPLMLSTSWNKITLWNRDLAPTPGANLYGSHPFYLALEDGGSAHGVFLLNSNAMDVVLQPSPALSWRSTGGILDVYIFLGPEPKSVVQQYLDVVGYPFMPPYWGLGFHLCRWGYSSTAITRQVVENMTRAHFPLDVQWNDLDYMDSRRDFTFNKDGFRDFPAMVQELHQGGRRYMMIVDPGISSSGPAGSYRPYDEGLRRGVFITNETGQPLIGKVWPGSTAFPDFTNPEALAWWEDMVAEFHDQVPFDGMWIDMNEPSNFIRGSVDGCPNNELENPPYVPGVVGGTLQAATICASSHQFLSTHYNLHNLYGTTEAIASHRALVKARGTRPFVISRSTFAGHGRYAGHWTGDVWSSWEQLASSVPEILQFNLLGVPLVGADVCGFLGNTSEELCVRWTQLGAFYPFMRNHNSLTSLPQEPYSFSEPAQQAMRKALGLRYALLPHLYTLFHQAHVHGETVARPLFLEFPKDSSTWTVDHQMLWGEALLITPVLQPGKAEVTGYFPLGTWYDLQTVPVEALGSLPPPPAAPREPAIHSEGQWVTLPAPLDTINVHLREGYIIPLQGPGLTTTESRKQPMALAVALTKSGEARGELFWDDGESLEVLERGAYTQVIFEARNNTIVNELVHVTSEGAGLQLGKVTVLGVATAPQQVLSNGRPVSNFTYSPDTKVLDICVWLLMGEQFLVSWC

SEQ ID NO: 399 - DNA, 2832 bp, synthetic construct
  misc_feature 1..2832: note = Variant of the Homo Sapiens Lysosomal alpha-glucosidase
  source 1..2832: mol_type = other DNA
atggaatggagctgggtctttctcttcttcctgtcagtaacgactggtgtccactccggacacattctgtggcatgatttttctaccgtgcctagagagctttccggttcaagtcaagtcctcgaagaaacacatccagcccatcaggttggcgcatctaggccgggccctcgggacgctcaactccacccagggagacctagggccgttcccactcagtgcgacgtgccagagaactcacgcttcgattgtgcacctgagaaggctatcacgcaagagcagtgcgaggcccgcggatgttgttacataccggctaaacaggggctgcagggtgcgcagatgggccaaccttggtgcttcttcccaccatcctatccgagttacaagctggagaatctctcccagtctgaaatgggatataccgcaacactgactcggaccaccccctccttctttcccaaagatatcttgactctgagacttgacgtaatgatggagacagaaaacaggctccactttaccattaaggaccctgccaatcgccgatacgaggtgcctctggaaacaccacacgtgcacagtagagctccatcacctctgtattctgtcgagttctccgaagagccgtttggcgttatcgtcaggaggcagctcgacgggcgagtgcttctgaacacgactgtggccccgttgttctttgcggatcagtttctgcaactgtcaacaagtctcccttctcagtacattaccgggcttgcagagcatctgtccccactcatgctgagtacttcatggaacaaaatcacactgtggaatagagaccttgctcctactccaggagccaacttgtatggttctcaccctttctacttggccctggaagatggcggatcagcgcatggcgtattcctcctgaattccaacgcaatggacgttgttcttcagccatctcctgctttgagttggagatctacaggcgggatactggacgtctacatctttctgggtccagagcctaaatccgtagtgcagcagtatcttgatgtcgtcggatacccgtttatgccaccatattggggcctggggttccacttgtgccgctggggatattcatccaccgccattacacgacaagttgttgagaatatgaccagggcacattttcctctggatgtacagtggaacgacctggactacatggatagtcgccgcgacttcaccttcaataaggatgggttcagagactttcctgctatggtccaagaacttcaccagggaggcaggaggtacatgatgatcgtagatccgggaatttcttcttctggcccagccggttcatacagaccgtatgacgaaggactgcgacgaggcgtctttatcacgaacgagactggtcagcctttgataggcaaggtttggccagggtccaccgctttcccggatttcacaaatcctgaggcactggcctggtgggaagatatggtcgccgagtttcacgaccaggtcccatttgacgggatgtggatcgacatgaacgagccatccaacttcattagaggaagtgtggatggctgtccgaataatgagctggaaaaccctccttacgtaccaggcgttgttggtgggactcttcaagctgcgacgatttgcgcatcctcccatcagttcctgtcaacccactataacttgcacaatctgtacgggacaacagaggctatcgccagtcatagggccctggtaaaagctagaggaacacgccctttcgttatctctcgctcaacttttgcaggccacggtaggtatgccggacattggaccggcgacgtctggagttcttgggaacagctggcttcctccgttccagagatattgcagtttaacctgttgggagtcccacttgtaggtgcagatgtttgtggcttcctggggaacacctcagaagaattgtgcgtaagatggactcaactgggcgccttctacccttttatgcgcaatcacaactcactgacatctttgcctcaagaaccgtactcatttagtgagccagcacagcaggccatgaggaaggctcttcagctgagatatgcacttctgccgcatctgtacacccttttccaccaggctcatgtccatggagagactgttgcacgacctctgttcttggagttcccaaaagactcttccacgtggacagtcgatcaccagatgctgtggggcgaggctctgctgattacacctgtattgcaacctggtaaggccgaagttaccgggtactttccattggggacctggtatgatctgcaaacagtcccggttgaagctcttggaagtcttccacctccacctgctgcaccaagggagcctgcgatccactctgaaggacagtgggtaactttgcctgcaccgctggacaccatcaatgtccatctgcgcgaaggctacatcataccacttcaaggtcctggactgaccactacagagtctagaaaacaaccaatggctcttgctgttgcactgactaaaagcggcgaagcaaggggtgagctgttctgggacgacggagagtcactggaggtactcgaacgaggcgcgtatacgcaggtcatttttgaggctcgcaataatacgatcgttaacgagctggtccacgtcacttcagaaggtgcaggccttcagttgggcaaggtaactgtcctgggagttgctacagcaccgcagcaggtcttgtccaacggacggcccgtaagcaactttacctatagtcctgataccaaagttctggacatctgcgttgctctgctgatgggtgagcagttcctggtatcatggtgc

SEQ ID NO: 400 - protein, 944 aa, synthetic construct
  REGION 1..944: note = Variant of the Homo Sapiens Lysosomal alpha-glucosidase
MEWSWVFLFFLSVTTGVHSGHILWHDFSTVPRELSGSSQVLEETHPAHQVGASRPGPRDAQLHPGRPRAVPTQCDVPENSRFDCAPEKAITQEQCEARGCCYIPAKQGLQGAQMGQPWCFFPPSYPSYKLENLSQSEMGYTATLTRTTPSFFPKDILTLRLDVMMETENRLHFTIKDPANRRYEVPLETPHVHSRAPSPLYSVEFSEEPFGVIVRRQLDGRVLLNTTVAPLFFADQFLQLSTSLPSQYITGLAEHLSPLMLSTSWNKITLWNRDLAPTPGANLYGSHPFYLALEDGGSAHGVFLLNSNAMDVVLQPSPALSWRSTGGILDVYIFLGPEPKSVVQQYLDVVGYPFMPPYWGLGFHLCRWGYSSTAITRQVVENMTRAHFPLDVQWNDLDYMDSRRDFTFNKDGFRDFPAMVQELHQGGRRYMMIVDPGISSSGPAGSYRPYDEGLRRGVFITNETGQPLIGKVWPGSTAFPDFTNPEALAWWEDMVAEFHDQVPFDGMWIDMNEPSNFIRGSVDGCPNNELENPPYVPGVVGGTLQAATICASSHQFLSTHYNLHNLYGTTEAIASHRALVKARGTRPFVISRSTFAGHGRYAGHWTGDVWSSWEQLASSVPEILQFNLLGVPLVGADVCGFLGNTSEELCVRWTQLGAFYPFMRNHNSLTSLPQEPYSFSEPAQQAMRKALQLRYALLPHLYTLFHQAHVHGETVARPLFLEFPKDSSTWTVDHQMLWGEALLITPVLQPGKAEVTGYFPLGTWYDLQTVPVEALGSLPPPPAAPREPAIHSEGQWVTLPAPLDTINVHLREGYIIPLQGPGLTTTESRKQPMALAVALTKSGEARGELFWDDGESLEVLERGAYTQVIFEARNNTIVNELVHVTSEGAGLQLGKVTVLGVATAPQQVLSNGRPVSNFTYSPDTKVLDICVALLMGEQFLVSWC

SEQ ID NO: 401 - DNA, 2832 bp, synthetic construct
  misc_feature 1..2832: note = Variant of the Homo Sapiens Lysosomal alpha-glucosidase
  source 1..2832: mol_type = other DNA
atggaatggagctgggtctttctcttcttcctgtcagtaacgactggtgtccactccggacacattctgtggcatgatttttctaccgtgcctagagagctttccggttcaagtcaagtcctcgaagaaacacatccagcccatcaggttggcgcatctaggccgggccctcgggacgctcaactccacccagggagacctagggccgttcccactcagtgcgacgtgccagagaactcacgcttcgattgtgcacctgagaaggctatcacgcaagagcagtgcgaggcccgcggatgttgttacataccggctaaacaggggctgcagggtgcgcagatgggccaaccttggtgcttcttcccaccatcctatccgagttacaagctggagaatctctccttttctgaaatgggatataccgcaacactgactcggaccaccccctccttctttcccaaagatatcttgactctgagacttgacgtaatgatggagacagaaaacaggctccactttaccattaaggaccctgccaatcgccgatacgaggtgcctctggaaacaccacacgtgcacagtagagctccatcacctctgtattctgtcgagttctccgaagagccgtttggcgttatcgtcaggaggcagctcgacgggcgagtgcttctgaacacgactgtggccccgttgttctttgcggatcagtttctgcaactgtcaacaagtctcccttctcagtacattaccgggcttgcagagcatctgtccccactcatgctgagtacttcatggaacaaaatcacactgtggaatagagaccttgctcctactccaggagccaacttgtatggttctcaccctttctacttggccctggaagatggcggatcagcgcatggcgtattcctcctgaattccaacgcaatggacgttgttcttcagccatctcctgctttgagttggagatctacaggcgggatactggacgtctacatctttctgggtccagagcctaaatccgtagtgcagcagtatcttgatgtcgtcggatacccgtttatgccaccatattggggcctggggttccacttgtgccgctggggatattcatccaccgccattacacgacaagttgttgagaatatgaccagggcacattttcctctggatgtacagtggaacgacctggactacatggatagtcgccgcgacttcaccttcaataaggatgggttcagagactttcctgctatggtccaagaacttcaccagggaggcaggaggtacatgatgatcgtagatccgggaatttcttcttctggcccagccggttcatacagaccgtatgacgaaggactgcgacgaggcgtctttatcacgaacgagactggtcagcctttgataggcaaggtttggccagggtccaccgctttcccggatttcacaaatcctgaggcactggcctggtgggaagatatggtcgccgagtttcacgaccaggtcccatttgacgggatgtggatcgacatgaacgagccatccaacttcattagaggaagtgtggatggctgtccgaataatgagctggaaaaccctccttacgtaccaggcgttgttggtgggactcttcaagctgcgacgatttgcgcatcctcccatcagttcctgtcaacccactataacttgcacaatctgtacgggacaacagaggctatcgccagtcatagggccctggtaaaagctagaggaacacgccctttcgttatctctcgctcaacttttgcaggccacggtaggtatgccggacattggaccggcgacgtctggagttcttgggaacagctggcttcctccgttccagagatattgcagtttaacctgttgggagtcccacttgtaggtgcagatgtttgtggcttcctggggaacacctcagaagaattgtgcgtaagatggactcaactgggcgccttctacccttttatgcgcaatcacaactcactgacatctttgcctcaagaaccgtactcatttagtgagccagcacagcaggccatgaggaaggctcttggcctgagatatgcacttctgccgcatctgtacacccttttccaccaggctcatgtccatggagagactgttgcacgacctctgttcttggagttcccaaaagactcttccacgtggacagtcgatcaccagatgctgtggggcgaggctctgctgattacacctgtattgcaacctggtaaggccgaagttaccgggtactttccattggggacctggtatgatctgcaaacagtcccggttgaagctcttggaagtcttccacctccacctgctgcaccaagggagcctgcgatccactctgaaggacagtgggtaactttgcctgcaccgctggacaccatcaatgtccatctgcgcgaaggctacatcataccacttcaaggtcctggactgaccactacagagtctagaaaacaaccaatggctcttgctgttgcactgactaaaagcggcgaagcaaggggtgagctgttctgggacgacggagagtcactggaggtactcgaacgaggcgcgtatacgcaggtcatttttgaggctcgcaataatacgatcgttaacgagctggtccacgtcacttcagaaggtgcaggccttcagttgggcaaggtaactgtcctgggagttgctacagcaccgcagcaggtcttgtccaacggacggcccgtaagcaactttacctatagtcctgataccaaagttctggacatctgcgttgctctgctgatgggtgagcagttcctggtatcatggtgc

SEQ ID NO: 402 - protein, 944 aa, synthetic construct
  REGION 1..944: note = Variant of the Homo Sapiens Lysosomal alpha-glucosidase
MEWSWVFLFFLSVTTGVHSGHILWHDFSTVPRELSGSSQVLEETHPAHQVGASRPGPRDAQLHPGRPRAVPTQCDVPENSRFDCAPEKAITQEQCEARGCCYIPAKQGLQGAQMGQPWCFFPPSYPSYKLENLSFSEMGYTATLTRTTPSFFPKDILTLRLDVMMETENRLHFTIKDPANRRYEVPLETPHVHSRAPSPLYSVEFSEEPFGVIVRRQLDGRVLLNTTVAPLFFADQFLQLSTSLPSQYITGLAEHLSPLMLSTSWNKITLWNRDLAPTPGANLYGSHPFYLALEDGGSAHGVFLLNSNAMDVVLQPSPALSWRSTGGILDVYIFLGPEPKSVVQQYLDVVGYPFMPPYWGLGFHLCRWGYSSTAITRQVVENMTRAHFPLDVQWNDLDYMDSRRDFTFNKDGFRDFPAMVQELHQGGRRYMMIVDPGISSSGPAGSYRPYDEGLRRGVFITNETGQPLIGKVWPGSTAFPDFTNPEALAWWEDMVAEFHDQVPFDGMWIDMNEPSNFIRGSVDGCPNNELENPPYVPGVVGGTLQAATICASSHQFLSTHYNLHNLYGTTEAIASHRALVKARGTRPFVISRSTFAGHGRYAGHWTGDVWSSWEQLASSVPEILQFNLLGVPLVGADVCGFLGNTSEELCVRWTQLGAFYPFMRNHNSLTSLPQEPYSFSEPAQQAMRKALGLRYALLPHLYTLFHQAHVHGETVARPLFLEFPKDSSTWTVDHQMLWGEALLITPVLQPGKAEVTGYFPLGTWYDLQTVPVEALGSLPPPPAAPREPAIHSEGQWVTLPAPLDTINVHLREGYIIPLQGPGLTTTESRKQPMALAVALTKSGEARGELFWDDGESLEVLERGAYTQVIFEARNNTIVNELVHVTSEGAGLQLGKVTVLGVATAPQQVLSNGRPVSNFTYSPDTKVLDICVALLMGEQFLVSWC

SEQ ID NO: 403 - DNA, 2832 bp, synthetic construct
  misc_feature 1..2832: note = Variant of the Homo Sapiens Lysosomal alpha-glucosidase
  source 1..2832: mol_type = other DNA
atggaatggagctgggtctttctcttcttcctgtcagtaacgactggtgtccactccggacacattctgtggcatgatttttctaccgtgcctagagagctttccggttcaagtcaagtcctcgaagaaacacatccagcccatcaggttggcgcatctaggccgggccctcgggacgctcaactccacccagggagacctagggccgttcccactcagtgcgacgtgccacctaactcacgcttcgattgtgcacctgagaaggctatcacgcaagagcagtgcgaggcccgcggatgttgttacataccggctaaacaggggctgcagggtgcgcagatgggccaaccttggtgcttcttcccaccatcctatccgagttacaagctggagaatctctcccagtctgaaatgggatataccgcaacactgactcggaccaccccctccttctttcccaaagatatcttgactctgagacttgacgtaatgatggagacagaaaacaggctccactttaccattaaggaccctgccaatcgccgatacgaggtgcctctggaaacaccacacgtgcacagtagagctccatcacctctgtattctgtcgagttctccgaagagccgtttggcgttatcgtcaggaggcagctcgacgggcgagtgcttctgaacacgactgtggccccgttgttctttgcggatcagtttctgcaactgtcaacaagtctcccttctcagtacattaccgggcttgcagagcatctgtccccactcatgctgagtacttcatggaacaaaatcacactgtggaatagagaccttgctcctactccaggagccaacttgtatggttctcaccctttctacttggccctggaagatggcggatcagcgcatggcgtattcctcctgaattccaacgcaatggacgttgttcttcagccatctcctgctttgagttggagatctacaggcgggatactggacgtctacatctttctgggtccagagcctaaatccgtagtgcagcagtatcttgatgtcgtcggatacccgtttatgccaccatattggggcctggggttccacttgtgccgctggggatattcatccaccgccattacacgacaagttgttgagaatatgaccagggcacattttcctctggatgtacagtggaacgacctggactacatggatagtcgccgcgacttcaccttcaataaggatgggttcagagactttcctgctatggtccaagaacttcaccagggaggcaggaggtacatgatgatcgtagatccgggaatttcttcttctggcccagccggttcatacagaccgtatgacgaaggactgcgacgaggcgtctttatcacgaacgagactggtcagcctttgataggcaaggtttggccagggtccaccgctttcccggatttcacaaatcctgaggcactggcctggtgggaagatatggtcgccgagtttcacgaccaggtcccatttgacgggatgtggatcgacatgaacgagccatccaacttcattagaggaagtgtggatggctgtccgaataatgagctggaaaaccctccttacgtaccaggcgttgttggtgggactcttcaagctgcgacgatttgcgcatcctcccatcagttcctgtcaacccactataacttgcacaatctgtacgggacaacagaggctatcgccagtcatagggccctggtaaaagctagaggaacacgccctttcgttatctctcgctcaacttttgcaggccacggtaggtatgccggacattggaccggcgacgtctggagttcttgggaacagctggcttcctccgttccagagatattgcagtttaacctgttgggagtcccacttgtaggtgcagatgtttgtggcttcctggggaacacctcagaagaattgtgcgtaagatggactcaactgggcgccttctacccttttatgcgcaatcacaactcactgacatctttgcctcaagaaccgtactcatttagtgagccagcacagcaggccatgaggaaggctcttggcctgagatatgcacttctgccgcatctgtacacccttttccaccaggctcatgtccatggagagactgttgcacgacctctgttcttggagttcccaaaagactcttccacgtggacagtcgatcaccagatgctgtggggcgaggctctgctgattacacctgtattgcaacctggtaaggccgaagttaccgggtactttccattggggacctggtatgatctgcaaacagtcccggttgaagctcttggaagtcttccacctccacctgctgcaccaagggagcctgcgatccactctgaaggacagtgggtaactttgcctgcaccgctggacaccatcaatgtccatctgcgcgaaggctacatcataccacttcaaggtcctggactgaccactacagagtctagaaaacaaccaatggctcttgctgttgcactgactaaaagcggcgaagcaaggggtgagctgttctgggacgacggagagtcactggaggtactcgaacgaggcgcgtatacgcaggtcatttttgaggctcgcaataatacgatcgttaacgagctggtccacgtcacttcagaaggtgcaggccttcagttgggcaaggtaactgtcctgggagttgctacagcaccgcagcaggtcttgtccaacggacggcccgtaagcaactttacctatagtcctgataccaaagttctggacatctgcgttgctctgctgatgggtgagcagttcctggtatcatggtgc

SEQ ID NO: 404 - protein, 944 aa, synthetic construct
  REGION 1..944: note = Variant of the Homo Sapiens Lysosomal alpha-glucosidase
MEWSWVFLFFLSVTTGVHSGHILWHDFSTVPRELSGSSQVLEETHPAHQVGASRPGPRDAQLHPGRPRAVPTQCDVPPNSRFDCAPEKAITQEQCEARGCCYIPAKQGLQGAQMGQPWCFFPPSYPSYKLENLSQSEMGYTATLTRTTPSFFPKDILTLRLDVMMETENRLHFTIKDPANRRYEVPLETPHVHSRAPSPLYSVEFSEEPFGVIVRRQLDGRVLLNTTVAPLFFADQFLQLSTSLPSQYITGLAEHLSPLMLSTSWNKITLWNRDLAPTPGANLYGSHPFYLALEDGGSAHGVFLLNSNAMDVVLQPSPALSWRSTGGILDVYIFLGPEPKSVVQQYLDVVGYPFMPPYWGLGFHLCRWGYSSTAITRQVVENMTRAHFPLDVQWNDLDYMDSRRDFTFNKDGFRDFPAMVQELHQGGRRYMMIVDPGISSSGPAGSYRPYDEGLRRGVFITNETGQPLIGKVWPGSTAFPDFTNPEALAWWEDMVAEFHDQVPFDGMWIDMNEPSNFIRGSVDGCPNNELENPPYVPGVVGGTLQAATICASSHQFLSTHYNLHNLYGTTEAIASHRALVKARGTRPFVISRSTFAGHGRYAGHWTGDVWSSWEQLASSVPEILQFNLLGVPLVGADVCGFLGNTSEELCVRWTQLGAFYPFMRNHNSLTSLPQEPYSFSEPAQQAMRKALGLRYALLPHLYTLFHQAHVHGETVARPLFLEFPKDSSTWTVDHQMLWGEALLITPVLQPGKAEVTGYFPLGTWYDLQTVPVEALGSLPPPPAAPREPAIHSEGQWVTLPAPLDTINVHLREGYIIPLQGPGLTTTESRKQPMALAVALTKSGEARGELFWDDGESLEVLERGAYTQVIFEARNNTIVNELVHVTSEGAGLQLGKVTVLGVATAPQQVLSNGRPVSNFTYSPDTKVLDICVALLMGEQFLVSWC

SEQ ID NO: 405 - DNA, 2832 bp, synthetic construct
  misc_feature 1..2832: note = Variant of the Homo Sapiens Lysosomal alpha-glucosidase
  source 1..2832: mol_type = other DNA
atggaatggagctgggtctttctcttcttcctgtcagtaacgactggtgtccactccggacacattctgtggcatgatttttctaccgtgcctagagagctttccggttcaagtcaagtcctcgaagaaacacatccagcccatcaggttggcgcatctaggccgggccctcgggacgctcaactccacccagggagacctagggccgttcccactcagtgcgacgtgccagagaactcacgcttcgattgtgcacctgagaaggctatcacgcaagagcagtgcgaggcccgcggatgttgttacataccggctaaacaggggctgcagggtgcgcagatgggccaaccttggtgcttcttcccaccatcctatccgagttacaagctggagaatctctcccagtctgaaatgggatataccgcaacactgactcggaccaccccctccttctttcccaaagatatcttgactctgagacttgacgtaatgatggagacagaaaacaggctccactttaccattaaggaccctgccaatcgccgatacgaggtgcctctggaaacaccacacgtgcacagtagagctccatcacctctgtattctgtcgagttctccgaagagccgtttggcgttatcgtcaggaggcagctcgacgggcgagtgcttctgaacacgactgtggccccgttgttctttgcggatcagtttctgcaactgtcaacaagtctcccttctcagtacattaccgggcttgcagagcatctgtccccactcatgctgagtacttcatggaacaaaatcacactgtggaatagagaccttgctcctactccaggagccaacttgtatggttctcaccctttctacttggccctggaagatggcggatcagcgcatggcgtattcctcctgaattccaacgcaatggacgttgttcttcagccatctcctgctttgagttggagatctacaggcgggatactggacgtctacatctttctgggtccagagcctaaatccgtagtgcagcagtatcttgatgtcgtcggatacccgtttatgccaccatattggggcctggggttccacttgtgccgctggggatattcatccaccgccattacacgacaagttgttgagaatatgaccagggcacattttcctctggatgtacagtggaacgacctggactacatggatagtcgccgcgacttcaccttcaataaggatgggttcagagactttcctgctatggtccaagaacttcaccagggaggcaggaggtacatgatgatcgtagatccgggaatttcttcttctggcccagccggttcatacagaccgtatgacgaaggactgcgacgaggcgtctttatcacgaacgagactggtcagcctttgataggcaaggtttggccagggtccaccgctttcccggatttcacaaatcctgaggcactggcctggtgggaagatatggtcgccgagtttcacgaccaggtcccatttgacgggatgtggatcgacatgaacgagccatccaacttcattagaggaagtgtggatggctgtccgaataatgagctggaaaaccctccttacgtaccaggcgttgttggtgggactcttcaagctgcgacgatttgcgcatcctcccatcagttcctgtcaacccactataacttgcacaatctgtacgggacaacagaggctatcgccagtcatagggccctggtaaaagctagaggaacacgccctttcgttatctctcgctcaacttttgcaggccacggtaggtatgccggacattggaccggcgacgtctggagttcttgggaacagctggcttcctccgttccagagatattgcagtttaacctgttgggagtcccacttgtaggtgcagatgtttgtggcttcctggggaacacctcagaagaattgtgcgtaagatggactcaactgggcgccttctacccttttatgcgcaatcacaactcactgacatctttgcctcaagaaccgtactcatttagtgagccagcacagcaggccatgaggaaggctcttggcctgagatatgcacttctgccgcatctgtacacccttttccaccaggctcatgtccatggagagactgttgcacgacctctgttcttggagttcccaaaagactcttccacgtggacagtcgatcaccagatgctgtggggcgaggctctgctgattacacctgtattgcaacctggtaaggccgaagttaccgggtactttccattggggacctggtatgatctgcaaacagtcccggttgaagctcttggaagtcttccacctccacctgctgcaccaagggagcctgcgatccactctgaaggacagtgggtaactttgcctgcaccgctggacaccatcaatgtccatctgcgcgaaggctacatcataccacttcaaggtcctggactgaccactacagagtctagaaaacaaccaatggctcttgctgttgcactgactaaaagcggcgaagcaaggggtgagctgttctgggacgacggagagtcactggaggtactcgaacgaggcgcgtatacgcaggtcattttttttgctcgcaataatacgatcgttaacgagctggtccacgtcacttcagaaggtgcaggccttcagttgggcaaggtaactgtcctgggagttgctacagcaccgcagcaggtcttgtccaacggacggcccgtaagcaactttacctatagtcctgataccaaagttctggacatctgcgttgctctgctgatgggtgagcagttcctggtatcatggtgc

SEQ ID NO: 406 - protein, 944 aa, synthetic construct
  REGION 1..944: note = Variant of the Homo Sapiens Lysosomal alpha-glucosidase
MEWSWVFLFFLSVTTGVHSGHILWHDFSTVPRELSGSSQVLEETHPAHQVGASRPGPRDAQLHPGRPRAVPTQCDVPENSRFDCAPEKAITQEQCEARGCCYIPAKQGLQGAQMGQPWCFFPPSYPSYKLENLSQSEMGYTATLTRTTPSFFPKDILTLRLDVMMETENRLHFTIKDPANRRYEVPLETPHVHSRAPSPLYSVEFSEEPFGVIVRRQLDGRVLLNTTVAPLFFADQFLQLSTSLPSQYITGLAEHLSPLMLSTSWNKITLWNRDLAPTPGANLYGSHPFYLALEDGGSAHGVFLLNSNAMDVVLQPSPALSWRSTGGILDVYIFLGPEPKSVVQQYLDVVGYPFMPPYWGLGFHLCRWGYSSTAITRQVVENMTRAHFPLDVQWNDLDYMDSRRDFTFNKDGFRDFPAMVQELHQGGRRYMMIVDPGISSSGPAGSYRPYDEGLRRGVFITNETGQPLIGKVWPGSTAFPDFTNPEALAWWEDMVAEFHDQVPFDGMWIDMNEPSNFIRGSVDGCPNNELENPPYVPGVVGGTLQAATICASSHQFLSTHYNLHNLYGTTEAIASHRALVKARGTRPFVISRSTFAGHGRYAGHWTGDVWSSWEQLASSVPEILQFNLLGVPLVGADVCGFLGNTSEELCVRWTQLGAFYPFMRNHNSLTSLPQEPYSFSEPAQQAMRKALGLRYALLPHLYTLFHQAHVHGETVARPLFLEFPKDSSTWTVDHQMLWGEALLITPVLQPGKAEVTGYFPLGTWYDLQTVPVEALGSLPPPPAAPREPAIHSEGQWVTLPAPLDTINVHLREGYIIPLQGPGLTTTESRKQPMALAVALTKSGEARGELFWDDGESLEVLERGAYTQVIFFARNNTIVNELVHVTSEGAGLQLGKVTVLGVATAPQQVLSNGRPVSNFTYSPDTKVLDICVALLMGEQFLVSWC

SEQ ID NO: 407 - DNA, 2832 bp, synthetic construct
  misc_feature 1..2832: note = Variant of the Homo Sapiens Lysosomal alpha-glucosidase
  source 1..2832: mol_type = other DNA
atggaatggagctgggtctttctcttcttcctgtcagtaacgactggtgtccactccggacacattctgtggcatgatttttctaccgtgcctagagagctttccggttcaagtcaagtcctcgaagaaacacatccagcccatcaggttggcgcatctaggccgggccctcgggacgctcaactccacccagggagacctagggccgttcccactcagtgcgacgtgccagagaactcacgcttcgattgtgcacctgagaaggctatcacgcaagagcagtgcgaggcccgcggatgttgttacataccggctaaacaggggctgcagggtgcgcagatgggccaaccttggtgcttcttcccaccatcctatccgagttacaagctggagaatctctcccagtctgaaatgggatataccgcaacactgactcggaccaccccctccttctttcccaaagatatcttgactctgagacttgacgtaatgatggagacagaaaacaggctccactttaccattaaggaccctgccaatcgccgatacgaggtgcctctggaaacaccacacgtgcacagtagagctccatcacctctgtattctgtcgagttctccgaagagccgtttggcgttatcgtcaggaggcagctcgacgggcgagtgcttctgaacacgactgtggccccgttgttctttgcggatcagtttctgcaactgtcaacaagtctcccttctcagtacattaccgggcttgcagagcatctgtccccactcatgctgagtacttcatggaacaaaatcacactgtggaatagagaccttgctcctactccaggagccaacttgtatggttctcaccctttctacttggccctggaagatggcggatcagcgcatggcgtattcctcctgaattccaacgcaatggacgttgttcttcagccatctcctgctttgagttggagatctacaggcgggatactggacgtctacatctttctgggtccagagcctaaatccgtagtgcagcagtatcttgatgtcgtcggatacccgtttatgccaccatattggggcctggggttccacttgtgccgctggggatattcatccaccgccattacacgacaagttgttgagaatatgaccagggcacattttcctctggatgtacagtggaacgacctggactacatggatagtcgccgcgacttcaccttcaataaggatgggttcagagactttcctgctatggtccaagaacttcaccagggaggcaggaggtacatgatgatcgtagatccgggaatttcttcttctggcccagccggttcatacagaccgtatgacgaaggactgcgacgaggcgtctttatcacgaacgagactggtcagcctttgataggcaaggtttggccagggtccaccgctttcccggatttcacaaatcctgaggcactggcctggtgggaagatatggtcgccgagtttcacgaccaggtcccatttgacgggatgtggatcgacatgaacgagccatccaacttcattagaggaagtgtggatggctgtccgaataatgagctggaaaaccctccttacgtaccaggcgttgttggtgggactcttcaagctgcgacgatttgcgcatcctcccatcagttcctgtcaacccactataacttgcacaatctgtacgggacaacagaggctatcgccagtcatagggccctggtaaaagctagaggaacacgccctttcgttatctctcgctcaacttttgcaggccacggtaggtatgccggacattggaccggcgacgtctggagttcttgggaacagctggcttcctccgttccagagatattgcagtttaacctgttgggagtcccacttgtaggtgcagatgtttgtggcttcctggggaacacctcagaagaattgtgcgtaagatggactcaactgggcgccttctacccttttatgcgcaatcacaactcactgtattctttgcctcaagaaccgtactcatttagtgagccagcacagcaggccatgaggaaggctcttggcctgagatatgcacttctgccgcatctgtacacccttttccaccaggctcatgtccatggagagactgttgcacgacctctgttcttggagttcccaaaagactcttccacgtggacagtcgatcaccagatgctgtggggcgaggctctgctgattacacctgtattgcaacctggtaaggccgaagttaccgggtactttccattggggacctggtatgatctgcaaacagtcccggttgaagctcttggaagtcttccacctccacctgctgcaccaagggagcctgcgatccactctgaaggacagtgggtaactttgcctgcaccgctggacaccatcaatgtccatctgcgcgaaggctacatcataccacttcaaggtcctggactgaccactacagagtctagaaaacaaccaatggctcttgctgttgcactgactaaaagcggcgaagcaaggggtgagctgttctgggacgacggagagtcactggaggtactcgaacgaggcgcgtatacgcaggtcatttttgaggctcgcaataatacgatcgttaacgagctggtccacgtcacttcagaaggtgcaggccttcagttgggcaaggtaactgtcctgggagttgctacagcaccgcagcaggtcttgtccaacggacggcccgtaagcaactttacctatagtcctgataccaaagttctggacatctgcgttgctctgctgatgggtgagcagttcctggtatcatggtgc

SEQ ID NO: 408 - protein, 944 aa, synthetic construct
  REGION 1..944: note = Variant of the Homo Sapiens Lysosomal alpha-glucosidase
MEWSWVFLFFLSVTTGVHSGHILWHDFSTVPRELSGSSQVLEETHPAHQVGASRPGPRDAQLHPGRPRAVPTQCDVPENSRFDCAPEKAITQEQCEARGCCYIPAKQGLQGAQMGQPWCFFPPSYPSYKLENLSQSEMGYTATLTRTTPSFFPKDILTLRLDVMMETENRLHFTIKDPANRRYEVPLETPHVHSRAPSPLYSVEFSEEPFGVIVRRQLDGRVLLNTTVAPLFFADQFLQLSTSLPSQYITGLAEHLSPLMLSTSWNKITLWNRDLAPTPGANLYGSHPFYLALEDGGSAHGVFLLNSNAMDVVLQPSPALSWRSTGGILDVYIFLGPEPKSVVQQYLDVVGYPFMPPYWGLGFHLCRWGYSSTAITRQVVENMTRAHFPLDVQWNDLDYMDSRRDFTFNKDGFRDFPAMVQELHQGGRRYMMIVDPGISSSGPAGSYRPYDEGLRRGVFITNETGQPLIGKVWPGSTAFPDFTNPEALAWWEDMVAEFHDQVPFDGMWIDMNEPSNFIRGSVDGCPNNELENPPYVPGVVGGTLQAATICASSHQFLSTHYNLHNLYGTTEAIASHRALVKARGTRPFVISRSTFAGHGRYAGHWTGDVWSSWEQLASSVPEILQFNLLGVPLVGADVCGFLGNTSEELCVRWTQLGAFYPFMRNHNSLYSLPQEPYSFSEPAQQAMRKALGLRYALLPHLYTLFHQAHVHGETVARPLFLEFPKDSSTWTVDHQMLWGEALLITPVLQPGKAEVTGYFPLGTWYDLQTVPVEALGSLPPPPAAPREPAIHSEGQWVTLPAPLDTINVHLREGYIIPLQGPGLTTTESRKQPMALAVALTKSGEARGELFWDDGESLEVLERGAYTQVIFEARNNTIVNELVHVTSEGAGLQLGKVTVLGVATAPQQVLSNGRPVSNFTYSPDTKVLDICVALLMGEQFLVSWC

SEQ ID NO: 409 - DNA, 2832 bp, synthetic construct
  misc_feature 1..2832: note = Variant of the Homo Sapiens Lysosomal alpha-glucosidase
  source 1..2832: mol_type = other DNA
atggaatggagctgggtctttctcttcttcctgtcagtaacgactggtgtccactccggacacattctgtggcatgatttttctaccgtgcctagagagctttccggttcaagtcaagtcctcgaagaaacacatccagcccatcaggttggcgcatctaggccgggccctcgggacgctcaactccacccagggagacctagggccgttcccactcagtgcgacgtgccagagaactcacgcttcgattgtgcacctgagaaggctatcacgcaagagcagtgcgaggcccgcggatgttgttacataccggctaaacaggggctgcagggtgcgcagatgggccaaccttggtgcttcttcccaccatcctatccgagttacaagctggagaatctctcccagtctgaaatgggatataccgcaacactgactcggaccaccccctccttctttcccaaagatatcttgactctgagacttgacgtaatgatggagacagaaaacaggctccactttaccattaaggaccctgccaatcgccgatacgaggtgcctctggaaacaccacacgtgcacagtagagctccatcacctctgtattctgtcgagttctccgaagagccgtttggcgttatcgtcaggaggcagctcgacgggcgagtgcttctgaacacgactgtggccccgttgttctttgcggatcagtttctgcaactgtcaacaagtctcccttctcagtacattaccgggcttgcagagcatctgtccccactcatgctgagtacttcatggaacaaaatcacactgtggaatagagaccttgctcctactccaggagccaacttgtatggttctcaccctttctacttggccctggaagatggcggatcagcgcatggcgtattcctcctgaattccaacgcaatggacgttgttcttcagccatctcctgctttgagttggagatctacaggcgggatactggacgtctacatctttctgggtccagagcctaaatccgtagtgcagcagtatcttgatgtcgtcggatacccgtttatgccaccatattggggcctggggttccacttgtgccgctggggatattcatccaccgccattacacgacaagttgttgagaatatgaccagggcacattttcctctggatgtacagtggaacgacctggactacatggatagtcgccgcgacttcaccttcaataaggatgggttcagagactttcctgctatggtccaagaacttcaccagggaggcaggaggtacatgatgatcgtagatccgggaatttcttcttctggcccagccggttcatacagaccgtatgacgaaggactgcgacgaggcgtctttatcacgaacgagactggtcagcctttgataggcaaggtttggccagggtccaccgctttcccggatttcacaaatcctgaggcactggcctggtgggaagatatggtcgccgagtttcacgaccaggtcccatttgacgggatgtggatcgacatgaacgagccatccaacttcattagaggaagtgtggatggctgtccgaataatgagctggaaaaccctccttacgtaccaggcgttgttggtgggactcttcaagctgcgacgatttgcgcatcctcccatcagttcctgtcaacccactataacttgcacaatctgtacgggacaacagaggctatcgccagtcatagggccctggtaaaagctagaggaacacgccctttcgttatctctcgctcaacttttgcaggccacggtaggtatgccggacattggaccggcgacgtctggagttcttgggaacagctggcttcctccgttccagagatattgcagtttaacctgttgggagtcccacttgtaggtgcagatgtttgtggcttcctggggaacacctcagaagaattgtgcgtaagatggactcaactgggcgccttctacccttttatgcgcaatcacaactcactgacatctttgcctcaagaaccgtactcatttagtgagccagcacagcaggccatgaggaaggctcttcttctgagatatgcacttctgccgcatctgtacacccttttccaccaggctcatgtccatggagagactgttgcacgacctctgttcttggagttcccaaaagactcttccacgtggacagtcgatcaccagatgctgtggggcgaggctctgctgattacacctgtattgcaacctggtaaggccgaagttaccgggtactttccattggggacctggtatgatctgcaaacagtcccggttgaagctcttggaagtcttccacctccacctgctgcaccaagggagcctgcgatccactctgaaggacagtgggtaactttgcctgcaccgctggacaccatcaatgtccatctgcgcgaaggctacatcataccacttcaaggtcctggactgaccactacagagtctagaaaacaaccaatggctcttgctgttgcactgactaaaagcggcgaagcaaggggtgagctgttctgggacgacggagagtcactggaggtactcgaacgaggcgcgtatacgcaggtcatttttgaggctcgcaataatacgatcgttaacgagctggtccacgtcacttcagaaggtgcaggccttcagttgggcaaggtaactgtcctgggagttgctacagcaccgcagcaggtcttgtccaacggacggcccgtaagcaactttacctatagtcctgataccaaagttctggacatctgcgttgctctgctgatgggtgagcagttcctggtatcatggtgc

SEQ ID NO: 410 - protein, 944 aa, synthetic construct
  REGION 1..944: note = Variant of the Homo Sapiens Lysosomal alpha-glucosidase
MEWSWVFLFFLSVTTGVHSGHILWHDFSTVPRELSGSSQVLEETHPAHQVGASRPGPRDAQLHPGRPRAVPTQCDVPENSRFDCAPEKAITQEQCEARGCCYIPAKQGLQGAQMGQPWCFFPPSYPSYKLENLSQSEMGYTATLTRTTPSFFPKDILTLRLDVMMETENRLHFTIKDPANRRYEVPLETPHVHSRAPSPLYSVEFSEEPFGVIVRRQLDGRVLLNTTVAPLFFADQFLQLSTSLPSQYITGLAEHLSPLMLSTSWNKITLWNRDLAPTPGANLYGSHPFYLALEDGGSAHGVFLLNSNAMDVVLQPSPALSWRSTGGILDVYIFLGPEPKSVVQQYLDVVGYPFMPPYWGLGFHLCRWGYSSTAITRQVVENMTRAHFPLDVQWNDLDYMDSRRDFTFNKDGFRDFPAMVQELHQGGRRYMMIVDPGISSSGPAGSYRPYDEGLRRGVFITNETGQPLIGKVWPGSTAFPDFTNPEALAWWEDMVAEFHDQVPFDGMWIDMNEPSNFIRGSVDGCPNNELENPPYVPGVVGGTLQAATICASSHQFLSTHYNLHNLYGTTEAIASHRALVKARGTRPFVISRSTFAGHGRYAGHWTGDVWSSWEQLASSVPEILQFNLLGVPLVGADVCGFLGNTSEELCVRWTQLGAFYPFMRNHNSLTSLPQEPYSFSEPAQQAMRKALLLRYALLPHLYTLFHQAHVHGETVARPLFLEFPKDSSTWTVDHQMLWGEALLITPVLQPGKAEVTGYFPLGTWYDLQTVPVEALGSLPPPPAAPREPAIHSEGQWVTLPAPLDTINVHLREGYIIPLQGPGLTTTESRKQPMALAVALTKSGEARGELFWDDGESLEVLERGAYTQVIFEARNNTIVNELVHVTSEGAGLQLGKVTVLGVATAPQQVLSNGRPVSNFTYSPDTKVLDICVALLMGEQFLVSWC

SEQ ID NO: 411 - DNA, 2832 bp, synthetic construct
  misc_feature 1..2832: note = Variant of the Homo Sapiens Lysosomal alpha-glucosidase
  source 1..2832: mol_type = other DNA
atggaatggagctgggtctttctcttcttcctgtcagtaacgactggtgtccactccggacacattctgtggcatgatttttctaccgtgcctagagagctttccggttcaagtcaagtcctcgaagaaacacatccagcccatcaggttggcgcatctaggccgggccctcgggacgctcaactccacccagggagacctagggccgttcccactcagtgcgacgtgccagagaactcacgcttcgattgtgcacctgagaaggctatcacgcaagagcagtgcgaggcccgcggatgttgttacataccggctaaacaggggctgcagggtgcgcagatgggccaaccttggtgcttcttcccaccatcctatccgagttacaagctggagaatctctccgagtctgaaatgggatataccgcaacactgactcggaccaccccctccttctttcccaaagatatcttgactctgagacttgacgtaatgatggagacagaaaacaggctccactttaccattaaggaccctgccaatcgccgatacgaggtgcctctggaaacaccacacgtgcacagtagagctccatcacctctgtattctgtcgagttctccgaagagccgtttggcgttatcgtcaggaggcagctcgacgggcgagtgcttctgaacacgactgtggccccgttgttctttgcggatcagtttctgcaactgtcaacaagtctcccttctcagtacattaccgggcttgcagagcatctgtccccactcatgctgagtacttcatggaacaaaatcacactgtggaatagagaccttgctcctactccaggagccaacttgtatggttctcaccctttctacttggccctggaagatggcggatcagcgcatggcgtattcctcctgaattccaacgcaatggacgttgttcttcagccatctcctgctttgagttggagatctacaggcgggatactggacgtctacatctttctgggtccagagcctaaatccgtagtgcagcagtatcttgatgtcgtcggatacccgtttatgccaccatattggggcctggggttccacttgtgccgctggggatattcatccaccgccattacacgacaagttgttgagaatatgaccagggcacattttcctctggatgtacagtggaacgacctggactacatggatagtcgccgcgacttcaccttcaataaggatgggttcagagactttcctgctatggtccaagaacttcaccagggaggcaggaggtacatgatgatcgtagatccgggaatttcttcttctggcccagccggttcatacagaccgtatgacgaaggactgcgacgaggcgtctttatcacgaacgagactggtcagcctttgataggcaaggtttggccagggtccaccgctttcccggatttcacaaatcctgaggcactggcctggtgggaagatatggtcgccgagtttcacgaccaggtcccatttgacgggatgtggatcgacatgaacgagccatccaacttcattagaggaagtgtggatggctgtccgaataatgagctggaaaaccctccttacgtaccaggcgttgttggtgggactcttcaagctgcgacgatttgcgcatcctcccatcagttcctgtcaacccactataacttgcacaatctgtacgggacaacagaggctatcgccagtcatagggccctggtaaaagctagaggaacacgccctttcgttatctctcgctcaacttttgcaggccacggtaggtatgccggacattggaccggcgacgtctggagttcttgggaacagctggcttcctccgttccagagatattgcagtttaacctgttgggagtcccacttgtaggtgcagatgtttgtggcttcctggggaacacctcagaagaattgtgcgtaagatggactcaactgggcgccttctacccttttatgcgcaatcacaactcactgacatctttgcctcaagaaccgtactcatttagtgagccagcacagcaggccatgaggaaggctcttggcctgagatatgcacttctgccgcatctgtacacccttttccaccaggctcatgtccatggagagactgttgcacgacctctgttcttggagttcccaaaagactcttccacgtggacagtcgatcaccagatgctgtggggcgaggctctgctgattacacctgtattgcaacctggtaaggccgaagttaccgggtactttccattggggacctggtatgatctgcaaacagtcccggttgaagctcttggaagtcttccacctccacctgctgcaccaagggagcctgcgatccactctgaaggacagtgggtaactttgcctgcaccgctggacaccatcaatgtccatctgcgcgaaggctacatcataccacttcaaggtcctggactgaccactacagagtctagaaaacaaccaatggctcttgctgttgcactgactaaaagcggcgaagcaaggggtgagctgttctgggacgacggagagtcactggaggtactcgaacgaggcgcgtatacgcaggtcatttttgaggctcgcaataatacgatcgttaacgagctggtccacgtcacttcagaaggtgcaggccttcagttgggcaaggtaactgtcctgggagttgctacagcaccgcagcaggtcttgtccaacggacggcccgtaagcaactttacctatagtcctgataccaaagttctggacatctgcgttgctctgctgatgggtgagcagttcctggtatcatggtgc

SEQ ID NO: 412 - protein, 944 aa, synthetic construct
  REGION 1..944: note = Variant of the Homo Sapiens Lysosomal alpha-glucosidase
MEWSWVFLFFLSVTTGVHSGHILWHDFSTVPRELSGSSQVLEETHPAHQVGASRPGPRDAQLHPGRPRAVPTQCDVPENSRFDCAPEKAITQEQCEARGCCYIPAKQGLQGAQMGQPWCFFPPSYPSYKLENLSESEMGYTATLTRTTPSFFPKDILTLRLDVMMETENRLHFTIKDPANRRYEVPLETPHVHSRAPSPLYSVEFSEEPFGVIVRRQLDGRVLLNTTVAPLFFADQFLQLSTSLPSQYITGLAEHLSPLMLSTSWNKITLWNRDLAPTPGANLYGSHPFYLALEDGGSAHGVFLLNSNAMDVVLQPSPALSWRSTGGILDVYIFLGPEPKSVVQQYLDVVGYPFMPPYWGLGFHLCRWGYSSTAITRQVVENMTRAHFPLDVQWNDLDYMDSRRDFTFNKDGFRDFPAMVQELHQGGRRYMMIVDPGISSSGPAGSYRPYDEGLRRGVFITNETGQPLIGKVWPGSTAFPDFTNPEALAWWEDMVAEFHDQVPFDGMWIDMNEPSNFIRGSVDGCPNNELENPPYVPGVVGGTLQAATICASSHQFLSTHYNLHNLYGTTEAIASHRALVKARGTRPFVISRSTFAGHGRYAGHWTGDVWSSWEQLASSVPEILQFNLLGVPLVGADVCGFLGNTSEELCVRWTQLGAFYPFMRNHNSLTSLPQEPYSFSEPAQQAMRKALGLRYALLPHLYTLFHQAHVHGETVARPLFLEFPKDSSTWTVDHQMLWGEALLITPVLQPGKAEVTGYFPLGTWYDLQTVPVEALGSLPPPPAAPREPAIHSEGQWVTLPAPLDTINVHLREGYIIPLQGPGLTTTESRKQPMALAVALTKSGEARGELFWDDGESLEVLERGAYTQVIFEARNNTIVNELVHVTSEGAGLQLGKVTVLGVATAPQQVLSNGRPVSNFTYSPDTKVLDICVALLMGEQFLVSWC

SEQ ID NO: 413 - DNA, 2832 bp, synthetic construct
  misc_feature 1..2832: note = Variant of the Homo Sapiens Lysosomal alpha-glucosidase
  source 1..2832: mol_type = other DNA
atggaatggagctgggtctttctcttcttcctgtcagtaacgactggtgtccactccggacacattctgtggcatgatttttctaccgtgcctagagagctttccggttcaagtcaagtcctcgaagaaacacatccagcccatcaggttggcgcatctaggccgggccctcgggacgctcaactccacccagggagacctagggccgttcccactcagtgcgacgtgccagagaactcacgcttcgattgtgcacctgagaaggctatcacgcaagagcagtgcgaggcccgcggatgttgttacataccggctaaacaggggctgcagggtgcgcagatgggccaaccttggtgcttcttcccaccatcctatccgagttacaagctggagaatctctcccagtctgaaatgggatataccgcaacactgactcggaccaccccctccttctttcccaaagatatcttgactctgagacttgacgtaatgatggagacagaaaacaggctccactttaccattaaggaccctgccaatcgccgatacgaggtgcctctggaaacaccacacgtgcacagtagagctccatcacctctgtattctgtcgagttctccgaagagccgtttggcgttatcgtcaggaggcagctcgacgggcgagtgcttctgaacacgactgtggccccgttgttctttgcggatcagtttctgcaactgtcaacaagtctcccttctcagtacattaccgggcttgcagagcatctgtccccactcatgctgagtacttcatggaacaaaatcacactgtggaatagagaccttgctcctactccaggagccaacttgtatggttctcaccctttctacttggccctggaagatggcggatcagcgcatggcgtattcctcctgaattccaacgcaatggacgttgttcttcagccatctcctgctttgagttggagatctacaggcgggatactggacgtctacatctttctgggtccagagcctaaatccgtagtgcagcagtatcttgatgtcgtcggatacccgtttatgccaccatattggggcctggggttccacttgtgccgctggggatattcatccaccgccattacacgacaagttgttgagaatatgaccagggcacattttcctctggatgtacagtggaacgacctggactacatggatagtcgccgcgacttcaccttcaataaggatgggttcagagactttcctgctatggtccaagaacttcaccagggaggcaggaggtacatgatgatcgtagatccgggaatttcttcttctggcccagccggttcatacagaccgtatgacgaaggactgcgacgaggcgtctttatcacgaacgagactggtcagcctttgataggcaaggtttggccagggtccaccgctttcccggatttcacaaatcctgaggcactggcctggtgggaagatatggtcgccgagtttcacgaccaggtcccatttgacgggatgtggatcgacatgaacgagccatccaacttcattagaggaagtgtggatggctgtccgaataatgagctggaaaaccctccttacgtaccaggcgttgttggtgggactcttcaagctgcgacgatttgcgcatcctcccatcagttcctgtcaacccactataacttgcacaatctgtacgggacaacagaggctatcgccagtcatagggccctggtaaaagctagaggaacacgccctttcgttatctctcgctcaacttttgcaggccacggtaggtatgccggacattggaccggcgacgtctggagttcttgggaacagctggcttcctccgttccagagatattgcagtttaacctgttgggagtcccacttgtaggtgcagatgtttgtggcttcctggggaacacctcagaagaattgtgcgtaagatggactcaactgggcgccttctacccttttatgcgcaatcacaactcactgttttctttgcctcaagaaccgtactcatttagtgagccagcacagcaggccatgaggaaggctcttggcctgagatatgcacttctgccgcatctgtacacccttttccaccaggctcatgtccatggagagactgttgcacgacctctgttcttggagttcccaaaagactcttccacgtggacagtcgatcaccagatgctgtggggcgaggctctgctgattacacctgtattgcaacctggtaaggccgaagttaccgggtactttccattggggacctggtatgatctgcaaacagtcccggttgaagctcttggaagtcttccacctccacctgctgcaccaagggagcctgcgatccactctgaaggacagtgggtaactttgcctgcaccgctggacaccatcaatgtccatctgcgcgaaggctacatcataccacttcaaggtcctggactgaccactacagagtctagaaaacaaccaatggctcttgctgttgcactgactaaaagcggcgaagcaaggggtgagctgttctgggacgacggagagtcactggaggtactcgaacgaggcgcgtatacgcaggtcatttttgaggctcgcaataatacgatcgttaacgagctggtccacgtcacttcagaaggtgcaggccttcagttgggcaaggtaactgtcctgggagttgctacagcaccgcagcaggtcttgtccaacggacggcccgtaagcaactttacctatagtcctgataccaaagttctggacatctgcgttgctctgctgatgggtgagcagttcctggtatcatggtgc

SEQ ID NO: 414 - protein, 944 aa, synthetic construct
  REGION 1..944: note = Variant of the Homo Sapiens Lysosomal alpha-glucosidase
MEWSWVFLFFLSVTTGVHSGHILWHDFSTVPRELSGSSQVLEETHPAHQVGASRPGPRDAQLHPGRPRAVPTQCDVPENSRFDCAPEKAITQEQCEARGCCYIPAKQGLQGAQMGQPWCFFPPSYPSYKLENLSQSEMGYTATLTRTTPSFFPKDILTLRLDVMMETENRLHFTIKDPANRRYEVPLETPHVHSRAPSPLYSVEFSEEPFGVIVRRQLDGRVLLNTTVAPLFFADQFLQLSTSLPSQYITGLAEHLSPLMLSTSWNKITLWNRDLAPTPGANLYGSHPFYLALEDGGSAHGVFLLNSNAMDVVLQPSPALSWRSTGGILDVYIFLGPEPKSVVQQYLDVVGYPFMPPYWGLGFHLCRWGYSSTAITRQVVENMTRAHFPLDVQWNDLDYMDSRRDFTFNKDGFRDFPAMVQELHQGGRRYMMIVDPGISSSGPAGSYRPYDEGLRRGVFITNETGQPLIGKVWPGSTAFPDFTNPEALAWWEDMVAEFHDQVPFDGMWIDMNEPSNFIRGSVDGCPNNELENPPYVPGVVGGTLQAATICASSHQFLSTHYNLHNLYGTTEAIASHRALVKARGTRPFVISRSTFAGHGRYAGHWTGDVWSSWEQLASSVPEILQFNLLGVPLVGADVCGFLGNTSEELCVRWTQLGAFYPFMRNHNSLFSLPQEPYSFSEPAQQAMRKALGLRYALLPHLYTLFHQAHVHGETVARPLFLEFPKDSSTWTVDHQMLWGEALLITPVLQPGKAEVTGYFPLGTWYDLQTVPVEALGSLPPPPAAPREPAIHSEGQWVTLPAPLDTINVHLREGYIIPLQGPGLTTTESRKQPMALAVALTKSGEARGELFWDDGESLEVLERGAYTQVIFEARNNTIVNELVHVTSEGAGLQLGKVTVLGVATAPQQVLSNGRPVSNFTYSPDTKVLDICVALLMGEQFLVSWC

SEQ ID NO: 415 - DNA, 2832 bp, synthetic construct
  misc_feature 1..2832: note = Variant of the Homo Sapiens Lysosomal alpha-glucosidase
  source 1..2832: mol_type = other DNA
atggaatggagctgggtctttctcttcttcctgtcagtaacgactggtgtccactccggacacattctgtggcatgatttttctaccgtgcctagagagctttccggttcaagtcaagtcctcgaagaaacacatccagcccatcagcatggcgcatctaggccgggccctcgggacgctcaactccacccagggagacctagggccgttcccactcagtgcgacgtgccagagaactcacgcttcgattgtgcacctgagaaggctatcacgcaagagcagtgcgaggcccgcggatgttgttacataccggctaaacaggggctgcagggtgcgcagatgggccaaccttggtgcttcttcccaccatcctatccgagttacaagctggagaatctctcccagtctgaaatgggatataccgcaacactgactcggaccaccccctccttctttcccaaagatatcttgactctgagacttgacgtaatgatggagacagaaaacaggctccactttaccattaaggaccctgccaatcgccgatacgaggtgcctctggaaacaccacacgtgcacagtagagctccatcacctctgtattctgtcgagttctccgaagagccgtttggcgttatcgtcaggaggcagctcgacgggcgagtgcttctgaacacgactgtggccccgttgttctttgcggatcagtttctgcaactgtcaacaagtctcccttctcagtacattaccgggcttgcagagcatctgtccccactcatgctgagtacttcatggaacaaaatcacactgtggaatagagaccttgctcctactccaggagccaacttgtatggttctcaccctttctacttggccctggaagatggcggatcagcgcatggcgtattcctcctgaattccaacgcaatggacgttgttcttcagccatctcctgctttgagttggagatctacaggcgggatactggacgtctacatctttctgggtccagagcctaaatccgtagtgcagcagtatcttgatgtcgtcggatacccgtttatgccaccatattggggcctggggttccacttgtgccgctggggatattcatccaccgccattacacgacaagttgttgagaatatgaccagggcacattttcctctggatgtacagtggaacgacctggactacatggatagtcgccgcgacttcaccttcaataaggatgggttcagagactttcctgctatggtccaagaacttcaccagggaggcaggaggtacatgatgatcgtagatccgggaatttcttcttctggcccagccggttcatacagaccgtatgacgaaggactgcgacgaggcgtctttatcacgaacgagactggtcagcctttgataggcaaggtttggccagggtccaccgctttcccggatttcacaaatcctgaggcactggcctggtgggaagatatggtcgccgagtttcacgaccaggtcccatttgacgggatgtggatcgacatgaacgagccatccaacttcattagaggaagtgtggatggctgtccgaataatgagctggaaaaccctccttacgtaccaggcgttgttggtgggactcttcaagctgcgacgatttgcgcatcctcccatcagttcctgtcaacccactataacttgcacaatctgtacgggacaacagaggctatcgccagtcatagggccctggtaaaagctagaggaacacgccctttcgttatctctcgctcaacttttgcaggccacggtaggtatgccggacattggaccggcgacgtctggagttcttgggaacagctggcttcctccgttccagagatattgcagtttaacctgttgggagtcccacttgtaggtgcagatgtttgtggcttcctggggaacacctcagaagaattgtgcgtaagatggactcaactgggcgccttctacccttttatgcgcaatcacaactcactgacatctttgcctcaagaaccgtactcatttagtgagccagcacagcaggccatgaggaaggctcttggcctgagatatgcacttctgccgcatctgtacacccttttccaccaggctcatgtccatggagagactgttgcacgacctctgttcttggagttcccaaaagactcttccacgtggacagtcgatcaccagatgctgtggggcgaggctctgctgattacacctgtattgcaacctggtaaggccgaagttaccgggtactttccattggggacctggtatgatctgcaaacagtcccggttgaagctcttggaagtcttccacctccacctgctgcaccaagggagcctgcgatccactctgaaggacagtgggtaactttgcctgcaccgctggacaccatcaatgtccatctgcgcgaaggctacatcataccacttcaaggtcctggactgaccactacagagtctagaaaacaaccaatggctcttgctgttgcactgactaaaagcggcgaagcaaggggtgagctgttctgggacgacggagagtcactggaggtactcgaacgaggcgcgtatacgcaggtcatttttgaggctcgcaataatacgatcgttaacgagctggtccacgtcacttcagaaggtgcaggccttcagttgggcaaggtaactgtcctgggagttgctacagcaccgcagcaggtcttgtccaacggacggcccgtaagcaactttacctatagtcctgataccaaagttctggacatctgcgttgctctgctgatgggtgagcagttcctggtatcatggtgc

SEQ ID NO: 416 - protein, 944 aa, synthetic construct
  REGION 1..944: note = Variant of the Homo Sapiens Lysosomal alpha-glucosidase
MEWSWVFLFFLSVTTGVHSGHILWHDFSTVPRELSGSSQVLEETHPAHQHGASRPGPRDAQLHPGRPRAVPTQCDVPENSRFDCAPEKAITQEQCEARGCCYIPAKQGLQGAQMGQPWCFFPPSYPSYKLENLSQSEMGYTATLTRTTPSFFPKDILTLRLDVMMETENRLHFTIKDPANRRYEVPLETPHVHSRAPSPLYSVEFSEEPFGVIVRRQLDGRVLLNTTVAPLFFADQFLQLSTSLPSQYITGLAEHLSPLMLSTSWNKITLWNRDLAPTPGANLYGSHPFYLALEDGGSAHGVFLLNSNAMDVVLQPSPALSWRSTGGILDVYIFLGPEPKSVVQQYLDVVGYPFMPPYWGLGFHLCRWGYSSTAITRQVVENMTRAHFPLDVQWNDLDYMDSRRDFTFNKDGFRDFPAMVQELHQGGRRYMMIVDPGISSSGPAGSYRPYDEGLRRGVFITNETGQPLIGKVWPGSTAFPDFTNPEALAWWEDMVAEFHDQVPFDGMWIDMNEPSNFIRGSVDGCPNNELENPPYVPGVVGGTLQAATICASSHQFLSTHYNLHNLYGTTEAIASHRALVKARGTRPFVISRSTFAGHGRYAGHWTGDVWSSWEQLASSVPEILQFNLLGVPLVGADVCGFLGNTSEELCVRWTQLGAFYPFMRNHNSLTSLPQEPYSFSEPAQQAMRKALGLRYALLPHLYTLFHQAHVHGETVARPLFLEFPKDSSTWTVDHQMLWGEALLITPVLQPGKAEVTGYFPLGTWYDLQTVPVEALGSLPPPPAAPREPAIHSEGQWVTLPAPLDTINVHLREGYIIPLQGPGLTTTESRKQPMALAVALTKSGEARGELFWDDGESLEVLERGAYTQVIFEARNNTIVNELVHVTSEGAGLQLGKVTVLGVATAPQQVLSNGRPVSNFTYSPDTKVLDICVALLMGEQFLVSWC

SEQ ID NO: 417 - DNA, 2832 bp, synthetic construct
  misc_feature 1..2832: note = Variant of the Homo Sapiens Lysosomal alpha-glucosidase
  source 1..2832: mol_type = other DNA
atggaatggagctgggtctttctcttcttcctgtcagtaacgactggtgtccactccggacacattctgtggcatgatttttctaccgtgcctagagagctttccggttcaagtcaagtcctcgaagaaacacatccagcccatcaggttggcgcatctaggccgggccctcgggacgctcaactccacccagggagacctagggccgttcccactcagtgcgacgtgccagagaactcacgcttcgattgtgcacctattaaggctatcacgcaagagcagtgcgaggcccgcggatgttgttacataccggctaaacaggggctgcagggtgcgcagatgggccaaccttggtgcttcttcccaccatcctatccgagttacaagctggagaatctctcccagtctgaaatgggatataccgcaacactgactcggaccaccccctccttctttcccaaagatatcttgactctgagacttgacgtaatgatggagacagaaaacaggctccactttaccattaaggaccctgccaatcgccgatacgaggtgcctctggaaacaccacacgtgcacagtagagctccatcacctctgtattctgtcgagttctccgaagagccgtttggcgttatcgtcaggaggcagctcgacgggcgagtgcttctgaacacgactgtggccccgttgttctttgcggatcagtttctgcaactgtcaacaagtctcccttctcagtacattaccgggcttgcagagcatctgtccccactcatgctgagtacttcatggaacaaaatcacactgtggaatagagaccttgctcctactccaggagccaacttgtatggttctcaccctttctacttggccctggaagatggcggatcagcgcatggcgtattcctcctgaattccaacgcaatggacgttgttcttcagccatctcctgctttgagttggagatctacaggcgggatactggacgtctacatctttctgggtccagagcctaaatccgtagtgcagcagtatcttgatgtcgtcggatacccgtttatgccaccatattggggcctggggttccacttgtgccgctggggatattcatccaccgccattacacgacaagttgttgagaatatgaccagggcacattttcctctggatgtacagtggaacgacctggactacatggatagtcgccgcgacttcaccttcaataaggatgggttcagagactttcctgctatggtccaagaacttcaccagggaggcaggaggtacatgatgatcgtagatccgggaatttcttcttctggcccagccggttcatacagaccgtatgacgaaggactgcgacgaggcgtctttatcacgaacgagactggtcagcctttgataggcaaggtttggccagggtccaccgctttcccggatttcacaaatcctgaggcactggcctggtgggaagatatggtcgccgagtttcacgaccaggtcccatttgacgggatgtggatcgacatgaacgagccatccaacttcattagaggaagtgtggatggctgtccgaataatgagctggaaaaccctccttacgtaccaggcgttgttggtgggactcttcaagctgcgacgatttgcgcatcctcccatcagttcctgtcaacccactataacttgcacaatctgtacgggacaacagaggctatcgccagtcatagggccctggtaaaagctagaggaacacgccctttcgttatctctcgctcaacttttgcaggccacggtaggtatgccggacattggaccggcgacgtctggagttcttgggaacagctggcttcctccgttccagagatattgcagtttaacctgttgggagtcccacttgtaggtgcagatgtttgtggcttcctggggaacacctcagaagaattgtgcgtaagatggactcaactgggcgccttctacccttttatgcgcaatcacaactcactgacatctttgcctcaagaaccgtactcatttagtgagccagcacagcaggccatgaggaaggctcttggcctgagatatgcacttctgccgcatctgtacacccttttccaccaggctcatgtccatggagagactgttgcacgacctctgttcttggagttcccaaaagactcttccacgtggacagtcgatcaccagatgctgtggggcgaggctctgctgattacacctgtattgcaacctggtaaggccgaagttaccgggtactttccattggggacctggtatgatctgcaaacagtcccggttgaagctcttggaagtcttccacctccacctgctgcaccaagggagcctgcgatccactctgaaggacagtgggtaactttgcctgcaccgctggacaccatcaatgtccatctgcgcgaaggctacatcataccacttcaaggtcctggactgaccactacagagtctagaaaacaaccaatggctcttgctgttgcactgactaaaagcggcgaagcaaggggtgagctgttctgggacgacggagagtcactggaggtactcgaacgaggcgcgtatacgcaggtcatttttgaggctcgcaataatacgatcgttaacgagctggtccacgtcacttcagaaggtgcaggccttcagttgggcaaggtaactgtcctgggagttgctacagcaccgcagcaggtcttgtccaacggacggcccgtaagcaactttacctatagtcctgataccaaagttctggacatctgcgttgctctgctgatgggtgagcagttcctggtatcatggtgc

SEQ ID NO: 418 - protein, 944 aa, synthetic construct
  REGION 1..944: note = Variant of the Homo Sapiens Lysosomal alpha-glucosidase
MEWSWVFLFFLSVTTGVHSGHILWHDFSTVPRELSGSSQVLEETHPAHQVGASRPGPRDAQLHPGRPRAVPTQCDVPENSRFDCAPIKAITQEQCEARGCCYIPAKQGLQGAQMGQPWCFFPPSYPSYKLENLSQSEMGYTATLTRTTPSFFPKDILTLRLDVMMETENRLHFTIKDPANRRYEVPLETPHVHSRAPSPLYSVEFSEEPFGVIVRRQLDGRVLLNTTVAPLFFADQFLQLSTSLPSQYITGLAEHLSPLMLSTSWNKITLWNRDLAPTPGANLYGSHPFYLALEDGGSAHGVFLLNSNAMDVVLQPSPALSWRSTGGILDVYIFLGPEPKSVVQQYLDVVGYPFMPPYWGLGFHLCRWGYSSTAITRQVVENMTRAHFPLDVQWNDLDYMDSRRDFTFNKDGFRDFPAMVQELHQGGRRYMMIVDPGISSSGPAGSYRPYDEGLRRGVFITNETGQPLIGKVWPGSTAFPDFTNPEALAWWEDMVAEFHDQVPFDGMWIDMNEPSNFIRGSVDGCPNNELENPPYVPGVVGGTLQAATICASSHQFLSTHYNLHNLYGTTEAIASHRALVKARGTRPFVISRSTFAGHGRYAGHWTGDVWSSWEQLASSVPEILQFNLLGVPLVGADVCGFLGNTSEELCVRWTQLGAFYPFMRNHNSLTSLPQEPYSFSEPAQQAMRKALGLRYALLPHLYTLFHQAHVHGETVARPLFLEFPKDSSTWTVDHQMLWGEALLITPVLQPGKAEVTGYFPLGTWYDLQTVPVEALGSLPPPPAAPREPAIHSEGQWVTLPAPLDTINVHLREGYIIPLQGPGLTTTESRKQPMALAVALTKSGEARGELFWDDGESLEVLERGAYTQVIFEARNNTIVNELVHVTSEGAGLQLGKVTVLGVATAPQQVLSNGRPVSNFTYSPDTKVLDICVALLMGEQFLVSWC

SEQ ID NO: 419 - DNA, 2832 bp, synthetic construct
  misc_feature 1..2832: note = Variant of the Homo Sapiens Lysosomal alpha-glucosidase
  source 1..2832: mol_type = other DNA
atggaatggagctgggtctttctcttcttcctgtcagtaacgactggtgtccactccggacacattctgtggcatgattttccgaccgtgcctagagagctttccggttcaagtcaagtcctcgaagaaacacatccagcccatcaggttggcgcatctaggccgggccctcgggacgctcaactccacccagggagacctagggccgttcccactcagtgcgacgtgccagagaactcacgcttcgattgtgcacctgagaaggctatcacgcaagagcagtgcgaggcccgcggatgttgttacataccggctaaacaggggctgcagggtgcgcagatgggccaaccttggtgcttcttcccaccatcctatccgagttacaagctggagaatctctcccagtctgaaatgggatataccgcaacactgactcggaccaccccctccttctttcccaaagatatcttgactctgagacttgacgtaatgatggagacagaaaacaggctccactttaccattaaggaccctgccaatcgccgatacgaggtgcctctggaaacaccacacgtgcacagtagagctccatcacctctgtattctgtcgagttctccgaagagccgtttggcgttatcgtcaggaggcagctcgacgggcgagtgcttctgaacacgactgtggccccgttgttctttgcggatcagtttctgcaactgtcaacaagtctcccttctcagtacattaccgggcttgcagagcatctgtccccactcatgctgagtacttcatggaacaaaatcacactgtggaatagagaccttgctcctactccaggagccaacttgtatggttctcaccctttctacttggccctggaagatggcggatcagcgcatggcgtattcctcctgaattccaacgcaatggacgttgttcttcagccatctcctgctttgagttggagatctacaggcgggatactggacgtctacatctttctgggtccagagcctaaatccgtagtgcagcagtatcttgatgtcgtcggatacccgtttatgccaccatattggggcctggggttccacttgtgccgctggggatattcatccaccgccattacacgacaagttgttgagaatatgaccagggcacattttcctctggatgtacagtggaacgacctggactacatggatagtcgccgcgacttcaccttcaataaggatgggttcagagactttcctgctatggtccaagaacttcaccagggaggcaggaggtacatgatgatcgtagatccgggaatttcttcttctggcccagccggttcatacagaccgtatgacgaaggactgcgacgaggcgtctttatcacgaacgagactggtcagcctttgataggcaaggtttggccagggtccaccgctttcccggatttcacaaatcctgaggcactggcctggtgggaagatatggtcgccgagtttcacgaccaggtcccatttgacgggatgtggatcgacatgaacgagccatccaacttcattagaggaagtgtggatggctgtccgaataatgagctggaaaaccctccttacgtaccaggcgttgttggtgggactcttcaagctgcgacgatttgcgcatcctcccatcagttcctgtcaacccactataacttgcacaatctgtacgggacaacagaggctatcgccagtcatagggccctggtaaaagctagaggaacacgccctttcgttatctctcgctcaacttttgcaggccacggtaggtatgccggacattggaccggcgacgtctggagttcttgggaacagctggcttcctccgttccagagatattgcagtttaacctgttgggagtcccacttgtaggtgcagatgtttgtggcttcctggggaacacctcagaagaattgtgcgtaagatggactcaactgggcgccttctacccttttatgcgcaatcacaactcactgacatctttgcctcaagaaccgtactcatttagtgagccagcacagcaggccatgaggaaggctcttggcctgagatatgcacttctgccgcatctgtacacccttttccaccaggctcatgtccatggagagactgttgcacgacctctgttcttggagttcccaaaagactcttccacgtggacagtcgatcaccagatgctgtggggcgaggctctgctgattacacctgtattgcaacctggtaaggccgaagttaccgggtactttccattggggacctggtatgatctgcaaacagtcccggttgaagctcttggaagtcttccacctccacctgctgcaccaagggagcctgcgatccactctgaaggacagtgggtaactttgcctgcaccgctggacaccatcaatgtccatctgcgcgaaggctacatcataccacttcaaggtcctggactgaccactacagagtctagaaaacaaccaatggctcttgctgttgcactgactaaaagcggcgaagcaaggggtgagctgttctgggacgacggagagtcactggaggtactcgaacgaggcgcgtatacgcaggtcatttttgaggctcgcaataatacgatcgttaacgagctggtccacgtcacttcagaaggtgcaggccttcagttgggcaaggtaactgtcctgggagttgctacagcaccgcagcaggtcttgtccaacggacggcccgtaagcaactttacctatagtcctgataccaaagttctggacatctgcgttgctctgctgatgggtgagcagttcctggtatcatggtgc

SEQ ID NO: 420 - protein, 944 aa, synthetic construct
  REGION 1..944: note = Variant of the Homo Sapiens Lysosomal alpha-glucosidase
MEWSWVFLFFLSVTTGVHSGHILWHDFPTVPRELSGSSQVLEETHPAHQVGASRPGPRDAQLHPGRPRAVPTQCDVPENSRFDCAPEKAITQEQCEARGCCYIPAKQGLQGAQMGQPWCFFPPSYPSYKLENLSQSEMGYTATLTRTTPSFFPKDILTLRLDVMMETENRLHFTIKDPANRRYEVPLETPHVHSRAPSPLYSVEFSEEPFGVIVRRQLDGRVLLNTTVAPLFFADQFLQLSTSLPSQYITGLAEHLSPLMLSTSWNKITLWNRDLAPTPGANLYGSHPFYLALEDGGSAHGVFLLNSNAMDVVLQPSPALSWRSTGGILDVYIFLGPEPKSVVQQYLDVVGYPFMPPYWGLGFHLCRWGYSSTAITRQVVENMTRAHFPLDVQWNDLDYMDSRRDFTFNKDGFRDFPAMVQELHQGGRRYMMIVDPGISSSGPAGSYRPYDEGLRRGVFITNETGQPLIGKVWPGSTAFPDFTNPEALAWWEDMVAEFHDQVPFDGMWIDMNEPSNFIRGSVDGCPNNELENPPYVPGVVGGTLQAATICASSHQFLSTHYNLHNLYGTTEAIASHRALVKARGTRPFVISRSTFAGHGRYAGHWTGDVWSSWEQLASSVPEILQFNLLGVPLVGADVCGFLGNTSEELCVRWTQLGAFYPFMRNHNSLTSLPQEPYSFSEPAQQAMRKALGLRYALLPHLYTLFHQAHVHGETVARPLFLEFPKDSSTWTVDHQMLWGEALLITPVLQPGKAEVTGYFPLGTWYDLQTVPVEALGSLPPPPAAPREPAIHSEGQWVTLPAPLDTINVHLREGYIIPLQGPGLTTTESRKQPMALAVALTKSGEARGELFWDDGESLEVLERGAYTQVIFEARNNTIVNELVHVTSEGAGLQLGKVTVLGVATAPQQVLSNGRPVSNFTYSPDTKVLDICVALLMGEQFLVSWC

SEQ ID NO: 421 - DNA, 2832 bp, synthetic construct
  misc_feature 1..2832: note = Variant of the Homo Sapiens Lysosomal alpha-glucosidase
  source 1..2832: mol_type = other DNA
atggaatggagctgggtctttctcttcttcctgtcagtaacgactggtgtccactccggacacattctgtggcatgatttttctaccgtgcctagagagctttccggttcaagtcaagtcctcgaagaaacacatccagcccatcaggttggcgcatctaggccgggccctcgggacgctcaactccacccagggagacctagggccgttcccactcagtgcgacgtgccagagaactcacgcttcgattgtgcacctgagaaggctatcacgcaagagcagtgcgaggcccgcggatgttgttacataccggctaaacaggggctgcagggtgcgcagatgggccaaccttggtgcttcttcccaccatcctatccgagttacaagctggagaatctctcccagtctgaaatgggatataccgcaacactgactcggaccaccccctccttctttcccaaagatatcttgactctgagacttgacgtaatgatggagacagaaaacaggctccactttaccattaaggaccctgccaatcgccgatacgaggtgcctctggaaacaccacacgtgcacagtagagctccatcacctctgtattctgtcgagttctccgaagagccgtttggcgttatcgtcaggaggcagctcgacgggcgagtgcttctgaacacgactgtggccccgttgttctttgcggatcagtttctgcaactgtcaacaagtctcccttctcagtacattaccgggcttgcagagcatctgtccccactcatgctgagtacttcatggaacaaaatcacactgtggaatagagaccttgctcctactccaggagccaacttgtatggttctcaccctttctacttggccctggaagatggcggatcagcgcatggcgtattcctcctgaattccaacgcaatggacgttgttcttcagccatctcctgctttgagttggagatctacaggcgggatactggacgtctacatctttctgggtccagagcctaaatccgtagtgcagcagtatcttgatgtcgtcggatacccgtttatgccaccatattggggcctggggttccacttgtgccgctggggatattcatccaccgccattacacgacaagttgttgagaatatgaccagggcacattttcctctggatgtacagtggaacgacctggactacatggatagtcgccgcgacttcaccttcaataaggatgggttcagagactttcctgctatggtccaagaacttcaccagggaggcaggaggtacatgatgatcgtagatccgggaatttcttcttctggcccagccggttcatacagaccgtatgacgaaggactgcgacgaggcgtctttatcacgaacgagactggtcagcctttgataggcaaggtttggccagggtccaccgctttcccggatttcacaaatcctgaggcactggcctggtgggaagatatggtcgccgagtttcacgaccaggtcccatttgacgggatgtggatcgacatgaacgagccatccaacttcattagaggaagtgtggatggctgtccgaataatgagctggaaaaccctccttacgtaccaggcgttgttggtgggactcttcaagctgcgacgatttgcgcatcctcccatcagttcctgtcaacccactataacttgcacaatctgtacgggacaacagaggctatcgccagtcatagggccctggtaaaagctagaggaacacgccctttcgttatctctcgctcaacttttgcaggccacggtaggtatgccggacattggaccggcgacgtctggagttcttgggaacagctggcttcctccgttccagagatattgcagtttaacctgttgggagtcccacttgtaggtgcagatgtttgtggcttcctggggaacacctcagaagaattgtgcgtaagatggactcaactgggcgccttctacccttttatgcgcaatcacaactcactgacatctttgcctcaagaaccgtactcatttagtgagccagcacagcaggccatgaggaaggctcttggcctgagatatgcacttctgccgcatctgtacacccttttccaccaggctcatgtccatggagagactgttgcacgacctctgttcttggagttcccaaaagactcttccacgtggacagtcgatcaccagatgctgtggggcgaggctctgctgattacacctgtattgcaacctggtaaggccgaagttaccgggtactttccattggggacctggtatgatctgcaaacagtcccggttgaagctcttggaagtcttccacctccacctgctgcaccaagggagcctgcgatccactctgaaggacagtgggtaactttgcctgcaccgctggacaccatcaatgtccatctgcgcgaaggctacatcataccacttcaaggtcctggactgaccactacagagtctagaaaacaaccaatggctcttgctgttgcactgactaaaagcggcgaagcaaggggtgagctgttctgggacgacggagagtcactggaggtactcgaacgaggcgcgtatacgcaggtcatttttgaggctcgcaataatacgatcgttaacgagctggtctttgtcacttcagaaggtgcaggccttcagttgggcaaggtaactgtcctgggagttgctacagcaccgcagcaggtcttgtccaacggacggcccgtaagcaactttacctatagtcctgataccaaagttctggacatctgcgttgctctgctgatgggtgagcagttcctggtatcatggtgc

SEQ ID NO: 422 - protein, 944 aa, synthetic construct
  REGION 1..944: note = Variant of the Homo Sapiens Lysosomal alpha-glucosidase
MEWSWVFLFFLSVTTGVHSGHILWHDFSTVPRELSGSSQVLEETHPAHQVGASRPGPRDAQLHPGRPRAVPTQCDVPENSRFDCAPEKAITQEQCEARGCCYIPAKQGLQGAQMGQPWCFFPPSYPSYKLENLSQSEMGYTATLTRTTPSFFPKDILTLRLDVMMETENRLHFTIKDPANRRYEVPLETPHVHSRAPSPLYSVEFSEEPFGVIVRRQLDGRVLLNTTVAPLFFADQFLQLSTSLPSQYITGLAEHLSPLMLSTSWNKITLWNRDLAPTPGANLYGSHPFYLALEDGGSAHGVFLLNSNAMDVVLQPSPALSWRSTGGILDVYIFLGPEPKSVVQQYLDVVGYPFMPPYWGLGFHLCRWGYSSTAITRQVVENMTRAHFPLDVQWNDLDYMDSRRDFTFNKDGFRDFPAMVQELHQGGRRYMMIVDPGISSSGPAGSYRPYDEGLRRGVFITNETGQPLIGKVWPGSTAFPDFTNPEALAWWEDMVAEFHDQVPFDGMWIDMNEPSNFIRGSVDGCPNNELENPPYVPGVVGGTLQAATICASSHQFLSTHYNLHNLYGTTEAIASHRALVKARGTRPFVISRSTFAGHGRYAGHWTGDVWSSWEQLASSVPEILQFNLLGVPLVGADVCGFLGNTSEELCVRWTQLGAFYPFMRNHNSLTSLPQEPYSFSEPAQQAMRKALGLRYALLPHLYTLFHQAHVHGETVARPLFLEFPKDSSTWTVDHQMLWGEALLITPVLQPGKAEVTGYFPLGTWYDLQTVPVEALGSLPPPPAAPREPAIHSEGQWVTLPAPLDTINVHLREGYIIPLQGPGLTTTESRKQPMALAVALTKSGEARGELFWDDGESLEVLERGAYTQVIFEARNNTIVNELVFVTSEGAGLQLGKVTVLGVATAPQQVLSNGRPVSNFTYSPDTKVLDICVALLMGEQFLVSWC

SEQ ID NO: 423 - DNA, 2832 bp, synthetic construct
  misc_feature 1..2832: note = Variant of the Homo Sapiens Lysosomal alpha-glucosidase
  source 1..2832: mol_type = other DNA
atggaatggagctgggtctttctcttcttcctgtcagtaacgactggtgtccactccggacacattctgtggcatgatttttctaccgtgcctagagagctttccggttcaagtcaagtcctcgaagaaacacatccagcccatcaggttggcgcatctaggccgggccctcgggacgctcaactccacccagggagacctagggccgttcccactcagtgcgacgtgccagagaactcacgcttcgattgtgcacctgagaaggctatcacgcaagagcagtgcgaggcccgcggatgttgttacataccggctaaacaggggctgcagggtgcgcagatgggccaaccttggtgcttcttcccaccatcctatccgagttacaagctggagaatctctcccagtctgaaatgggatataccgcaacactgactcggaccaccccctccttctttcccaaagatatcttgactctgagacttgacgtaatgatggagacagaaaacaggctccactttaccattaaggaccctgccaatcgccgatacgaggtgcctctggaaacaccacacgtgcacagtagagctccatcacctctgtattctgtcgagttctccgaagagccgtttggcgttatcgtcaggaggcagctcgacgggcgagtgcttctgaacacgactgtggccccgttgttctttgcggatcagtttctgcaactgtcaacaagtctcccttctcagtacattaccgggcttgcagagcatctgtccccactcatgctgagtacttcatggaacaaaatcacactgtggaatagagaccttgctcctactccaggagccaacttgtatggttctcaccctttctacttggccctggaagatggcggatcagcgcatggcgtattcctcctgaattccaacgcaatggacgttgttcttcagccatctcctgctttgagttggagatctacaggcgggatactggacgtctacatctttctgggtccagagcctaaatccgtagtgcagcagtatcttgatgtcgtcggatacccgtttatgccaccatattggggcctggggttccacttgtgccgctggggatattcatccaccgccattacacgacaagttgttgagaatatgaccagggcacattttcctctggatgtacagtggaacgacctggactacatggatagtcgccgcgacttcaccttcaataaggatgggttcagagactttcctgctatggtccaagaacttcaccagggaggcaggaggtacatgatgatcgtagatccgcatatttcttcttctggcccagccggttcatacagaccgtatgacgaaggactgcgacgaggcgtctttatcacgaacgagactggtcagcctttgataggcaaggtttggccagggtccaccgctttcccggatttcacaaatcctgaggcactggcctggtgggaagatatggtcgccgagtttcacgaccaggtcccatttgacgggatgtggatcgacatgaacgagccatccaacttcattagaggaagtgtggatggctgtccgaataatgagctggaaaaccctccttacgtaccaggcgttgttggtgggactcttcaagctgcgacgatttgcgcatcctcccatcagttcctgtcaacccactataacttgcacaatctgtacgggacaacagaggctatcgccagtcatagggccctggtaaaagctagaggaacacgccctttcgttatctctcgctcaacttttgcaggccacggtaggtatgccggacattggaccggcgacgtctggagttcttgggaacagctggcttcctccgttccagagatattgcagtttaacctgttgggagtcccacttgtaggtgcagatgtttgtggcttcctggggaacacctcagaagaattgtgcgtaagatggactcaactgggcgccttctacccttttatgcgcaatcacaactcactgacatctttgcctcaagaaccgtactcatttagtgagccagcacagcaggccatgaggaaggctcttggcctgagatatgcacttctgccgcatctgtacacccttttccaccaggctcatgtccatggagagactgttgcacgacctctgttcttggagttcccaaaagactcttccacgtggacagtcgatcaccagatgctgtggggcgaggctctgctgattacacctgtattgcaacctggtaaggccgaagttaccgggtactttccattggggacctggtatgatctgcaaacagtcccggttgaagctcttggaagtcttccacctccacctgctgcaccaagggagcctgcgatccactctgaaggacagtgggtaactttgcctgcaccgctggacaccatcaatgtccatctgcgcgaaggctacatcataccacttcaaggtcctggactgaccactacagagtctagaaaacaaccaatggctcttgctgttgcactgactaaaagcggcgaagcaaggggtgagctgttctgggacgacggagagtcactggaggtactcgaacgaggcgcgtatacgcaggtcatttttgaggctcgcaataatacgatcgttaacgagctggtccacgtcacttcagaaggtgcaggccttcagttgggcaaggtaactgtcctgggagttgctacagcaccgcagcaggtcttgtccaacggacggcccgtaagcaactttacctatagtcctgataccaaagttctggacatctgcgttgctctgctgatgggtgagcagttcctggtatcatggtgc

SEQ ID NO: 424 - protein, 944 aa, synthetic construct
  REGION 1..944: note = Variant of the Homo Sapiens Lysosomal alpha-glucosidase
MEWSWVFLFFLSVTTGVHSGHILWHDFSTVPRELSGSSQVLEETHPAHQVGASRPGPRDAQLHPGRPRAVPTQCDVPENSRFDCAPEKAITQEQCEARGCCYIPAKQGLQGAQMGQPWCFFPPSYPSYKLENLSQSEMGYTATLTRTTPSFFPKDILTLRLDVMMETENRLHFTIKDPANRRYEVPLETPHVHSRAPSPLYSVEFSEEPFGVIVRRQLDGRVLLNTTVAPLFFADQFLQLSTSLPSQYITGLAEHLSPLMLSTSWNKITLWNRDLAPTPGANLYGSHPFYLALEDGGSAHGVFLLNSNAMDVVLQPSPALSWRSTGGILDVYIFLGPEPKSVVQQYLDVVGYPFMPPYWGLGFHLCRWGYSSTAITRQVVENMTRAHFPLDVQWNDLDYMDSRRDFTFNKDGFRDFPAMVQELHQGGRRYMMIVDPHISSSGPAGSYRPYDEGLRRGVFITNETGQPLIGKVWPGSTAFPDFTNPEALAWWEDMVAEFHDQVPFDGMWIDMNEPSNFIRGSVDGCPNNELENPPYVPGVVGGTLQAATICASSHQFLSTHYNLHNLYGTTEAIASHRALVKARGTRPFVISRSTFAGHGRYAGHWTGDVWSSWEQLASSVPEILQFNLLGVPLVGADVCGFLGNTSEELCVRWTQLGAFYPFMRNHNSLTSLPQEPYSFSEPAQQAMRKALGLRYALLPHLYTLFHQAHVHGETVARPLFLEFPKDSSTWTVDHQMLWGEALLITPVLQPGKAEVTGYFPLGTWYDLQTVPVEALGSLPPPPAAPREPAIHSEGQWVTLPAPLDTINVHLREGYIIPLQGPGLTTTESRKQPMALAVALTKSGEARGELFWDDGESLEVLERGAYTQVIFEARNNTIVNELVHVTSEGAGLQLGKVTVLGVATAPQQVLSNGRPVSNFTYSPDTKVLDICVALLMGEQFLVSWC

SEQ ID NO: 425 - DNA, 2832 bp, synthetic construct
  misc_feature 1..2832: note = Variant of the Homo Sapiens Lysosomal alpha-glucosidase
  source 1..2832: mol_type = other DNA
atggaatggagctgggtctttctcttcttcctgtcagtaacgactggtgtccactccggacacattctgtggcatgatttttctaccgtgcctagagagctttccggttcaagtcaagtcctcgaagaaacacatccagcccatcaggttggcgcatctaggccgggccctcgggacgctcaaattcacccagggagacctagggccgttcccactcagtgcgacgtgccagagaactcacgcttcgattgtgcacctgagaaggctatcacgcaagagcagtgcgaggcccgcggatgttgttacataccggctaaacaggggctgcagggtgcgcagatgggccaaccttggtgcttcttcccaccatcctatccgagttacaagctggagaatctctcccagtctgaaatgggatataccgcaacactgactcggaccaccccctccttctttcccaaagatatcttgactctgagacttgacgtaatgatggagacagaaaacaggctccactttaccattaaggaccctgccaatcgccgatacgaggtgcctctggaaacaccacacgtgcacagtagagctccatcacctctgtattctgtcgagttctccgaagagccgtttggcgttatcgtcaggaggcagctcgacgggcgagtgcttctgaacacgactgtggccccgttgttctttgcggatcagtttctgcaactgtcaacaagtctcccttctcagtacattaccgggcttgcagagcatctgtccccactcatgctgagtacttcatggaacaaaatcacactgtggaatagagaccttgctcctactccaggagccaacttgtatggttctcaccctttctacttggccctggaagatggcggatcagcgcatggcgtattcctcctgaattccaacgcaatggacgttgttcttcagccatctcctgctttgagttggagatctacaggcgggatactggacgtctacatctttctgggtccagagcctaaatccgtagtgcagcagtatcttgatgtcgtcggatacccgtttatgccaccatattggggcctggggttccacttgtgccgctggggatattcatccaccgccattacacgacaagttgttgagaatatgaccagggcacattttcctctggatgtacagtggaacgacctggactacatggatagtcgccgcgacttcaccttcaataaggatgggttcagagactttcctgctatggtccaagaacttcaccagggaggcaggaggtacatgatgatcgtagatccgggaatttcttcttctggcccagccggttcatacagaccgtatgacgaaggactgcgacgaggcgtctttatcacgaacgagactggtcagcctttgataggcaaggtttggccagggtccaccgctttcccggatttcacaaatcctgaggcactggcctggtgggaagatatggtcgccgagtttcacgaccaggtcccatttgacgggatgtggatcgacatgaacgagccatccaacttcattagaggaagtgtggatggctgtccgaataatgagctggaaaaccctccttacgtaccaggcgttgttggtgggactcttcaagctgcgacgatttgcgcatcctcccatcagttcctgtcaacccactataacttgcacaatctgtacgggacaacagaggctatcgccagtcatagggccctggtaaaagctagaggaacacgccctttcgttatctctcgctcaacttttgcaggccacggtaggtatgccggacattggaccggcgacgtctggagttcttgggaacagctggcttcctccgttccagagatattgcagtttaacctgttgggagtcccacttgtaggtgcagatgtttgtggcttcctggggaacacctcagaagaattgtgcgtaagatggactcaactgggcgccttctacccttttatgcgcaatcacaactcactgacatctttgcctcaagaaccgtactcatttagtgagccagcacagcaggccatgaggaaggctcttggcctgagatatgcacttctgccgcatctgtacacccttttccaccaggctcatgtccatggagagactgttgcacgacctctgttcttggagttcccaaaagactcttccacgtggacagtcgatcaccagatgctgtggggcgaggctctgctgattacacctgtattgcaacctggtaaggccgaagttaccgggtactttccattggggacctggtatgatctgcaaacagtcccggttgaagctcttggaagtcttccacctccacctgctgcaccaagggagcctgcgatccactctgaaggacagtgggtaactttgcctgcaccgctggacaccatcaatgtccatctgcgcgaaggctacatcataccacttcaaggtcctggactgaccactacagagtctagaaaacaaccaatggctcttgctgttgcactgactaaaagcggcgaagcaaggggtgagctgttctgggacgacggagagtcactggaggtactcgaacgaggcgcgtatacgcaggtcatttttgaggctcgcaataatacgatcgttaacgagctggtccacgtcacttcagaaggtgcaggccttcagttgggcaaggtaactgtcctgggagttgctacagcaccgcagcaggtcttgtccaacggacggcccgtaagcaactttacctatagtcctgataccaaagttctggacatctgcgttgctctgctgatgggtgagcagttcctggtatcatggtgc

SEQ ID NO: 426 - protein, 944 aa, synthetic construct
  REGION 1..944: note = Variant of the Homo Sapiens Lysosomal alpha-glucosidase
MEWSWVFLFFLSVTTGVHSGHILWHDFSTVPRELSGSSQVLEETHPAHQVGASRPGPRDAQIHPGRPRAVPTQCDVPENSRFDCAPEKAITQEQCEARGCCYIPAKQGLQGAQMGQPWCFFPPSYPSYKLENLSQSEMGYTATLTRTTPSFFPKDILTLRLDVMMETENRLHFTIKDPANRRYEVPLETPHVHSRAPSPLYSVEFSEEPFGVIVRRQLDGRVLLNTTVAPLFFADQFLQLSTSLPSQYITGLAEHLSPLMLSTSWNKITLWNRDLAPTPGANLYGSHPFYLALEDGGSAHGVFLLNSNAMDVVLQPSPALSWRSTGGILDVYIFLGPEPKSVVQQYLDVVGYPFMPPYWGLGFHLCRWGYSSTAITRQVVENMTRAHFPLDVQWNDLDYMDSRRDFTFNKDGFRDFPAMVQELHQGGRRYMMIVDPGISSSGPAGSYRPYDEGLRRGVFITNETGQPLIGKVWPGSTAFPDFTNPEALAWWEDMVAEFHDQVPFDGMWIDMNEPSNFIRGSVDGCPNNELENPPYVPGVVGGTLQAATICASSHQFLSTHYNLHNLYGTTEAIASHRALVKARGTRPFVISRSTFAGHGRYAGHWTGDVWSSWEQLASSVPEILQFNLLGVPLVGADVCGFLGNTSEELCVRWTQLGAFYPFMRNHNSLTSLPQEPYSFSEPAQQAMRKALGLRYALLPHLYTLFHQAHVHGETVARPLFLEFPKDSSTWTVDHQMLWGEALLITPVLQPGKAEVTGYFPLGTWYDLQTVPVEALGSLPPPPAAPREPAIHSEGQWVTLPAPLDTINVHLREGYIIPLQGPGLTTTESRKQPMALAVALTKSGEARGELFWDDGESLEVLERGAYTQVIFEARNNTIVNELVHVTSEGAGLQLGKVTVLGVATAPQQVLSNGRPVSNFTYSPDTKVLDICVALLMGEQFLVSWC

SEQ ID NO: 427 - DNA, 2832 bp, synthetic construct
  misc_feature 1..2832: note = Variant of the Homo Sapiens Lysosomal alpha-glucosidase
  source 1..2832: mol_type = other DNA
atggaatggagctgggtctttctcttcttcctgtcagtaacgactggtgtccactccggacacattctgtggcatgatttttctaccgtgcctagagagctttccggttcaagtcaagtcctcgaagaaacacatccagcccatcaggttggcgcatctaggccgggccctcgggacgctcaactccacccagggagacctagggccgttcccactcagtgcgacgtgccagagaactcacgcttcgattgtgcacctgagaaggctatcacgcaagagcagtgcgaggcccgcggatgttgttacataccggctaaacaggggctgcagggtgcgcagatgggccaaccttggtgcttcttcccaccatcctatccgagttacaagctggagaatctctcccagtctgaaatgggatataccgcaacactgactcggaccaccccctccttctttcccaaagatatcttgactctgagacttgacgtaatgatggagacagaaaacaggctccactttaccattaaggaccctgccaatcgccgatacgaggtgcctctggaaacaccacacgtgcacagtagagctccatcacctctgtattctgtcgagttctccgaagagccgtttggcgttatcgtcaggaggcagctcgacgggcgagtgcttctgaacacgactgtggccccgttgttctttgcggatcagtttctgcaactgtcaacaagtctcccttctcagtacattaccgggcttgcagagcatctgtccccactcatgctgagtacttcatggaacaaaatcacactgtggaatagagaccttgctcctactccaggagccaacttgtatggttctcaccctttctacttggccctggaagatggcggatcagcgcatggcgtattcctcctgaattccaacgcaatggacgttgttcttcagccatctcctgctttgagttggagatctacaggcgggatactggacgtctacatctttctgggtccagagcctaaatccgtagtgcagcagtatcttgatgtcgtcggatacccgtttatgccaccatattggggcctggggttccacttgtgccgctggggatattcatccaccgccattacacgacaagttgttgagaatatgaccagggcacattttcctctggatgtacagtggaacgacctggactacatggatagtcgccgcgacttcaccttcaataaggatgggttcagagactttcctgctatggtccaagaacttcaccagggaggcaggaggtacatgatgatcgtagatccgggaatttcttcttctggcccagccggttcatacagaccgtatgacgaaggactgcgacgaggcgtctttatcacgaacgagactggtcagcctttgataggcaaggtttggccagggtccaccgctttcccggatttcacaaatcctgaggcactggcctggtgggaagatatggtcgccgagtttcacgaccaggtcccatttgacgggatgtggatcgacatgaacgagccatccaacttcattagaggaagtgtggatggctgtccgaataatgagctggaaaaccctccttacgtaccaggcgttgttggtgggactcttcaagctgcgacgatttgcgcatcctcccatcagttcctgtcaacccactataacttgcacaatctgtacgggacaacagaggctatcgccagtcatagggccctggtaaaagctagaggaacacgccctttcgttatctctcgctcaacttttgcaggccacggtaggtatgccggacattggaccggcgacgtctggagttcttgggaacagctggcttcctccgttccagagatattgcagtttaacctgttgggagtcccacttgtaggtgcagatgtttgtggcttcctggggaacacctcagaagaattgtgcgtaagatggactcaactgggcgccttctacccttttatgcgcaatcacaactcactgacatctttgcctcaagaaccgtactcatttagtgagccagcacagcaggccatgaggaaggctcttggcctgagatatgcacttctgccgcatctgtacacccttttccaccaggctcatgtccatggagagactgttgcacgacctctgttcttggagttcccaaaagactcttccacgtggacagtcgatcaccagatgctgtggggcgaggctctgctgattacacctgtattgcaacctggtaaggccgaagttaccgggtactttccattggggacctggtatgatctgcaaacagtcccggttgaagctcttggaagtcttccacctccacctgctgcaccaagggagcctgcgatccactctgaaggacagtgggtaactttgcctgcaccgctggacaccatcaatgtccatctgcgcgaaggctacatcataccacttcaaggtcctggactgaccactacagagtctagatggcaaccaatggctcttgctgttgcactgactaaaagcggcgaagcaaggggtgagctgttctgggacgacggagagtcactggaggtactcgaacgaggcgcgtatacgcaggtcatttttgaggctcgcaataatacgatcgttaacgagctggtccacgtcacttcagaaggtgcaggccttcagttgggcaaggtaactgtcctgggagttgctacagcaccgcagcaggtcttgtccaacggacggcccgtaagcaactttacctatagtcctgataccaaagttctggacatctgcgttgctctgctgatgggtgagcagttcctggtatcatggtgc

SEQ ID NO: 428 - protein, 944 aa, synthetic construct
  REGION 1..944: note = Variant of the Homo Sapiens Lysosomal alpha-glucosidase
MEWSWVFLFFLSVTTGVHSGHILWHDFSTVPRELSGSSQVLEETHPAHQVGASRPGPRDAQLHPGRPRAVPTQCDVPENSRFDCAPEKAITQEQCEARGCCYIPAKQGLQGAQMGQPWCFFPPSYPSYKLENLSQSEMGYTATLTRTTPSFFPKDILTLRLDVMMETENRLHFTIKDPANRRYEVPLETPHVHSRAPSPLYSVEFSEEPFGVIVRRQLDGRVLLNTTVAPLFFADQFLQLSTSLPSQYITGLAEHLSPLMLSTSWNKITLWNRDLAPTPGANLYGSHPFYLALEDGGSAHGVFLLNSNAMDVVLQPSPALSWRSTGGILDVYIFLGPEPKSVVQQYLDVVGYPFMPPYWGLGFHLCRWGYSSTAITRQVVENMTRAHFPLDVQWNDLDYMDSRRDFTFNKDGFRDFPAMVQELHQGGRRYMMIVDPGISSSGPAGSYRPYDEGLRRGVFITNETGQPLIGKVWPGSTAFPDFTNPEALAWWEDMVAEFHDQVPFDGMWIDMNEPSNFIRGSVDGCPNNELENPPYVPGVVGGTLQAATICASSHQFLSTHYNLHNLYGTTEAIASHRALVKARGTRPFVISRSTFAGHGRYAGHWTGDVWSSWEQLASSVPEILQFNLLGVPLVGADVCGFLGNTSEELCVRWTQLGAFYPFMRNHNSLTSLPQEPYSFSEPAQQAMRKALGLRYALLPHLYTLFHQAHVHGETVARPLFLEFPKDSSTWTVDHQMLWGEALLITPVLQPGKAEVTGYFPLGTWYDLQTVPVEALGSLPPPPAAPREPAIHSEGQWVTLPAPLDTINVHLREGYIIPLQGPGLTTTESRWQPMALAVALTKSGEARGELFWDDGESLEVLERGAYTQVIFEARNNTIVNELVHVTSEGAGLQLGKVTVLGVATAPQQVLSNGRPVSNFTYSPDTKVLDICVALLMGEQFLVSWC

SEQ ID NO: 429 - DNA, 2832 bp, synthetic construct
  misc_feature 1..2832: note = Variant of the Homo Sapiens Lysosomal alpha-glucosidase
  source 1..2832: mol_type = other DNA
atggaatggagctgggtctttctcttcttcctgtcagtaacgactggtgtccactccggacacattctgtggcatgatttttctaccgtgcctagagagctttccggttcaagtcaagtcctcgaagaaacacatccagcccatcaggttggcgcatctaggccgggccctcgggacgctcaactccacccagggagacctagggccgttcccactcagtgcgacgtgccagagaactcacgcttcgattgtgcacctgagaaggctatcacgcaagagcagtgcgaggcccgcggatgttgttacataccggctaaacaggggctgcagggtgcgcagatgggccaaccttggtgcttcttcccaccatcctatccgagttacaagctggagaatctctcccagtctgaaatgggatataccgcaacactgactcggaccaccccctccttctttcccaaagatatcttgactctgagacttgacgtaatgatggagacagaaaacaggctccactttaccattaaggaccctgccaatcgccgatacgaggtgcctctggaaacaccacacgtgcacagtagagctccatcacctctgtattctgtcgagttctccgaagagccgtttggcgttatcgtcaggaggcagctcgacgggcgagtgcttctgaacacgactgtggccccgttgttctttgcggatcagtttctgcaactgtcaacaagtctcccttctcagtacattaccgggcttgcagagcatctgtccccactcatgctgagtacttcatggaacaaaatcacactgtggaatagagaccttgctcctactccaggagccaacttgtatggttctcaccctttctacttggccctggaagatggcggatcagcgcatggcgtattcctcctgaattccaacgcaatggacgttgttcttcagccatctcctgctttgagttggagatctacaggcgggatactggacgtctacatctttctgggtccagagcctaaatccgtagtgcagcagtatcttgatgtcgtcggatacccgtttatgccaccatattggggcctggggttccacttgtgccgctggggatattcatccaccgccattacacgacaagttgttgagaatatgaccagggcacattttcctctggatgtacagtggaacgacctggactacatggatagtcgccgcgacttcaccttcaataaggatgggttcagagactttcctgctatggtccaagaacttcaccagggaggcaggaggtacatgatgatcgtagatccgggaatttcttcttctggcccagccggttcatacagaccgtatgacgaaggactgcgacgaggcgtctttatcacgaacgagactggtcagcctttgataggcaaggtttggccagggtccaccgctttcccggatttcacaaatcctgaggcactggcctggtgggaagatatggtcgccgagtttcacgaccaggtcccatttgacgggatgtggatcgacatgaacgagccatccaacttcattagaggaagtgtggatggctgtccgaataatgagctggaaaaccctccttacgtaccaggcgttgttggtgggactcttcaagctgcgacgatttgcgcatcctcccatcagttcctgtcaacccactataacttgcacaatctgtacgggacaacagaggctatcgccagtcatagggccctggtaaaagctagaggaacacgccctttcgttatctctcgctcaacttttgcaggccacggtaggtatgccggacattggaccggcgacgtctggagttcttgggaacagctggcttcctccgttccagagatattgcagtttaacctgttgggagtcccacttgtaggtgcagatgtttgtggcttcctggggaacacctcagaagaattgtgcgtaagatggactcaactgggcgccttctacccttttatgcgcaatcacaactcactgacatctttgcctcaagaaccgtactcatttagtgagccagcacagcaggccatgaggaaggctctttcgctgagatatgcacttctgccgcatctgtacacccttttccaccaggctcatgtccatggagagactgttgcacgacctctgttcttggagttcccaaaagactcttccacgtggacagtcgatcaccagatgctgtggggcgaggctctgctgattacacctgtattgcaacctggtaaggccgaagttaccgggtactttccattggggacctggtatgatctgcaaacagtcccggttgaagctcttggaagtcttccacctccacctgctgcaccaagggagcctgcgatccactctgaaggacagtgggtaactttgcctgcaccgctggacaccatcaatgtccatctgcgcgaaggctacatcataccacttcaaggtcctggactgaccactacagagtctagaaaacaaccaatggctcttgctgttgcactgactaaaagcggcgaagcaaggggtgagctgttctgggacgacggagagtcactggaggtactcgaacgaggcgcgtatacgcaggtcatttttgaggctcgcaataatacgatcgttaacgagctggtccacgtcacttcagaaggtgcaggccttcagttgggcaaggtaactgtcctgggagttgctacagcaccgcagcaggtcttgtccaacggacggcccgtaagcaactttacctatagtcctgataccaaagttctggacatctgcgttgctctgctgatgggtgagcagttcctggtatcatggtgc

SEQ ID NO: 430 - protein, 944 aa, synthetic construct
  REGION 1..944: note = Variant of the Homo Sapiens Lysosomal alpha-glucosidase
MEWSWVFLFFLSVTTGVHSGHILWHDFSTVPRELSGSSQVLEETHPAHQVGASRPGPRDAQLHPGRPRAVPTQCDVPENSRFDCAPEKAITQEQCEARGCCYIPAKQGLQGAQMGQPWCFFPPSYPSYKLENLSQSEMGYTATLTRTTPSFFPKDILTLRLDVMMETENRLHFTIKDPANRRYEVPLETPHVHSRAPSPLYSVEFSEEPFGVIVRRQLDGRVLLNTTVAPLFFADQFLQLSTSLPSQYITGLAEHLSPLMLSTSWNKITLWNRDLAPTPGANLYGSHPFYLALEDGGSAHGVFLLNSNAMDVVLQPSPALSWRSTGGILDVYIFLGPEPKSVVQQYLDVVGYPFMPPYWGLGFHLCRWGYSSTAITRQVVENMTRAHFPLDVQWNDLDYMDSRRDFTFNKDGFRDFPAMVQELHQGGRRYMMIVDPGISSSGPAGSYRPYDEGLRRGVFITNETGQPLIGKVWPGSTAFPDFTNPEALAWWEDMVAEFHDQVPFDGMWIDMNEPSNFIRGSVDGCPNNELENPPYVPGVVGGTLQAATICASSHQFLSTHYNLHNLYGTTEAIASHRALVKARGTRPFVISRSTFAGHGRYAGHWTGDVWSSWEQLASSVPEILQFNLLGVPLVGADVCGFLGNTSEELCVRWTQLGAFYPFMRNHNSLTSLPQEPYSFSEPAQQAMRKALSLRYALLPHLYTLFHQAHVHGETVARPLFLEFPKDSSTWTVDHQMLWGEALLITPVLQPGKAEVTGYFPLGTWYDLQTVPVEALGSLPPPPAAPREPAIHSEGQWVTLPAPLDTINVHLREGYIIPLQGPGLTTTESRKQPMALAVALTKSGEARGELFWDDGESLEVLERGAYTQVIFEARNNTIVNELVHVTSEGAGLQLGKVTVLGVATAPQQVLSNGRPVSNFTYSPDTKVLDICVALLMGEQFLVSWC

SEQ ID NO: 431 - DNA, 2832 bp, synthetic construct
  misc_feature 1..2832: note = Variant of the Homo Sapiens Lysosomal alpha-glucosidase
  source 1..2832: mol_type = other DNA
atggaatggagctgggtctttctcttcttcctgtcagtaacgactggtgtccactccggacacattctgtggcatgatttttctaaggtgcctagagagctttccggttcaagtcaagtcctcgaagaaacacatccagcccatcaggttggcgcatctaggccgggccctcgggacgctcaactccacccagggagacctagggccgttcccactcagtgcgacgtgccagagaactcacgcttcgattgtgcacctgagaaggctatcacgcaagagcagtgcgaggcccgcggatgttgttacataccggctaaacaggggctgcagggtgcgcagatgggccaaccttggtgcttcttcccaccatcctatccgagttacaagctggagaatctctcccagtctgaaatgggatataccgcaacactgactcggaccaccccctccttctttcccaaagatatcttgactctgagacttgacgtaatgatggagacagaaaacaggctccactttaccattaaggaccctgccaatcgccgatacgaggtgcctctggaaacaccacacgtgcacagtagagctccatcacctctgtattctgtcgagttctccgaagagccgtttggcgttatcgtcaggaggcagctcgacgggcgagtgcttctgaacacgactgtggccccgttgttctttgcggatcagtttctgcaactgtcaacaagtctcccttctcagtacattaccgggcttgcagagcatctgtccccactcatgctgagtacttcatggaacaaaatcacactgtggaatagagaccttgctcctactccaggagccaacttgtatggttctcaccctttctacttggccctggaagatggcggatcagcgcatggcgtattcctcctgaattccaacgcaatggacgttgttcttcagccatctcctgctttgagttggagatctacaggcgggatactggacgtctacatctttctgggtccagagcctaaatccgtagtgcagcagtatcttgatgtcgtcggatacccgtttatgccaccatattggggcctggggttccacttgtgccgctggggatattcatccaccgccattacacgacaagttgttgagaatatgaccagggcacattttcctctggatgtacagtggaacgacctggactacatggatagtcgccgcgacttcaccttcaataaggatgggttcagagactttcctgctatggtccaagaacttcaccagggaggcaggaggtacatgatgatcgtagatccgggaatttcttcttctggcccagccggttcatacagaccgtatgacgaaggactgcgacgaggcgtctttatcacgaacgagactggtcagcctttgataggcaaggtttggccagggtccaccgctttcccggatttcacaaatcctgaggcactggcctggtgggaagatatggtcgccgagtttcacgaccaggtcccatttgacgggatgtggatcgacatgaacgagccatccaacttcattagaggaagtgtggatggctgtccgaataatgagctggaaaaccctccttacgtaccaggcgttgttggtgggactcttcaagctgcgacgatttgcgcatcctcccatcagttcctgtcaacccactataacttgcacaatctgtacgggacaacagaggctatcgccagtcatagggccctggtaaaagctagaggaacacgccctttcgttatctctcgctcaacttttgcaggccacggtaggtatgccggacattggaccggcgacgtctggagttcttgggaacagctggcttcctccgttccagagatattgcagtttaacctgttgggagtcccacttgtaggtgcagatgtttgtggcttcctggggaacacctcagaagaattgtgcgtaagatggactcaactgggcgccttctacccttttatgcgcaatcacaactcactgacatctttgcctcaagaaccgtactcatttagtgagccagcacagcaggccatgaggaaggctcttggcctgagatatgcacttctgccgcatctgtacacccttttccaccaggctcatgtccatggagagactgttgcacgacctctgttcttggagttcccaaaagactcttccacgtggacagtcgatcaccagatgctgtggggcgaggctctgctgattacacctgtattgcaacctggtaaggccgaagttaccgggtactttccattggggacctggtatgatctgcaaacagtcccggttgaagctcttggaagtcttccacctccacctgctgcaccaagggagcctgcgatccactctgaaggacagtgggtaactttgcctgcaccgctggacaccatcaatgtccatctgcgcgaaggctacatcataccacttcaaggtcctggactgaccactacagagtctagaaaacaaccaatggctcttgctgttgcactgactaaaagcggcgaagcaaggggtgagctgttctgggacgacggagagtcactggaggtactcgaacgaggcgcgtatacgcaggtcatttttgaggctcgcaataatacgatcgttaacgagctggtccacgtcacttcagaaggtgcaggccttcagttgggcaaggtaactgtcctgggagttgctacagcaccgcagcaggtcttgtccaacggacggcccgtaagcaactttacctatagtcctgataccaaagttctggacatctgcgttgctctgctgatgggtgagcagttcctggtatcatggtgc

SEQ ID NO: 432 - protein, 944 aa, synthetic construct
  REGION 1..944: note = Variant of the Homo Sapiens Lysosomal alpha-glucosidase
MEWSWVFLFFLSVTTGVHSGHILWHDFSKVPRELSGSSQVLEETHPAHQVGASRPGPRDAQLHPGRPRAVPTQCDVPENSRFDCAPEKAITQEQCEARGCCYIPAKQGLQGAQMGQPWCFFPPSYPSYKLENLSQSEMGYTATLTRTTPSFFPKDILTLRLDVMMETENRLHFTIKDPANRRYEVPLETPHVHSRAPSPLYSVEFSEEPFGVIVRRQLDGRVLLNTTVAPLFFADQFLQLSTSLPSQYITGLAEHLSPLMLSTSWNKITLWNRDLAPTPGANLYGSHPFYLALEDGGSAHGVFLLNSNAMDVVLQPSPALSWRSTGGILDVYIFLGPEPKSVVQQYLDVVGYPFMPPYWGLGFHLCRWGYSSTAITRQVVENMTRAHFPLDVQWNDLDYMDSRRDFTFNKDGFRDFPAMVQELHQGGRRYMMIVDPGISSSGPAGSYRPYDEGLRRGVFITNETGQPLIGKVWPGSTAFPDFTNPEALAWWEDMVAEFHDQVPFDGMWIDMNEPSNFIRGSVDGCPNNELENPPYVPGVVGGTLQAATICASSHQFLSTHYNLHNLYGTTEAIASHRALVKARGTRPFVISRSTFAGHGRYAGHWTGDVWSSWEQLASSVPEILQFNLLGVPLVGADVCGFLGNTSEELCVRWTQLGAFYPFMRNHNSLTSLPQEPYSFSEPAQQAMRKALGLRYALLPHLYTLFHQAHVHGETVARPLFLEFPKDSSTWTVDHQMLWGEALLITPVLQPGKAEVTGYFPLGTWYDLQTVPVEALGSLPPPPAAPREPAIHSEGQWVTLPAPLDTINVHLREGYIIPLQGPGLTTTESRKQPMALAVALTKSGEARGELFWDDGESLEVLERGAYTQVIFEARNNTIVNELVHVTSEGAGLQLGKVTVLGVATAPQQVLSNGRPVSNFTYSPDTKVLDICVALLMGEQFLVSWC

SEQ ID NO: 433 - DNA, 2832 bp, synthetic construct
  misc_feature 1..2832: note = Variant of the Homo Sapiens Lysosomal alpha-glucosidase
  source 1..2832: mol_type = other DNA
atggaatggagctgggtctttctcttcttcctgtcagtaacgactggtgtccactccggacacattctgtggcatgatttttctaccgtgcctagagagctttccggttcaagtcaagtcctcgaagaaacacatccagcccatcaggttggcgcatctaggccgggccctcgggacgctcaactccacccagggagacctagggccgttcccactcagtgcgacgtgccagagaactcacgcttcgattgtgcacctgagaaggctatcacgcaagagcagtgcgaggcccgcggatgttgttacataccggctaaacaggggctgcagggtgcgcagatgggccaaccttggtgcttcttcccaccatcctatccgagttacaagctggagaatctctcccagtctgaaatgggatataccgcaacactgactcggaccaccccctccttctttcccaaagatatcttgactctgagacttgacgtaatgatggagacagaaaacaggctccactttaccattaaggaccctgccaatcgccgatacgaggtgcctctggaaacaccacacgtgcacagtagagctccatcacctctgtattctgtcgagttctccgaagagccgtttggcgttatcgtcaggaggcagctcgacgggcgagtgcttctgaacacgactgtggccccgttgttctttgcggatcagtttctgcaactgtcaacaagtctcccttctcagtacattaccgggcttgcagagcatctgtccccactcatgctgagtacttcatggaacaaaatcacactgtggaatagagaccttgctcctactccaggagccaacttgtatggttctcaccctttctacttggccctggaagatggcggatcagcgcatggcgtattcctcctgaattccaacgcaatggacgttgttcttcagccatctcctgctttgagttggagatctacaggcgggatactggacgtctacatctttctgggtccagagcctaaatccgtagtgcagcagtatcttgatgtcgtcggatacccgtttatgccaccatattggggcctggggttccacttgtgccgctggggatattcatccaccgccattacacgacaagttgttgagaatatgaccagggcacattttcctctggatgtacagtggaacgacctggactacatggatagtcgccgcgacttcaccttcaataaggatgggttcagagactttcctgctatggtccaagaacttcaccagggaggcaggaggtacatgatgatcgtagatccgggaatttcttcttctggcccagccggttcatacagaccgtatgacgaaggactgcgacgaggcgtctttatcacgaacgagactggtcagcctttgataggcaaggtttggccagggtccaccgctttcccggatttcacaaatcctgaggcactggcctggtgggaagatatggtcgccgagtttcacgaccaggtcccatttgacgggatgtggatcgacatgaacgagccatccaacttcattagaggaagtgtggatggctgtccgaataatgagctggaaaaccctccttacgtaccaggcgttgttggtgggactcttcaagctgcgacgatttgcgcatcctcccatcagttcctgtcaacccactataacttgcacaatctgtacgggacaacagaggctatcgccagtcatagggccctggtaaaagctagaggaacacgccctttcgttatctctcgctcaacttttgcaggccacggtaggtatgccggacattggaccggcgacgtctggagttcttgggaacagctggcttcctccgttccagagatattgcagtttaacctgttgggagtcccacttgtaggtgcagatgtttgtggcttcctggggaacacctcagaagaattgtgcgtaagatggactcaactgggcgccttctacccttttatgcgcaatcacaactcactggagtctttgcctcaagaaccgtactcatttagtgagccagcacagcaggccatgaggaaggctcttggcctgagatatgcacttctgccgcatctgtacacccttttccaccaggctcatgtccatggagagactgttgcacgacctctgttcttggagttcccaaaagactcttccacgtggacagtcgatcaccagatgctgtggggcgaggctctgctgattacacctgtattgcaacctggtaaggccgaagttaccgggtactttccattggggacctggtatgatctgcaaacagtcccggttgaagctcttggaagtcttccacctccacctgctgcaccaagggagcctgcgatccactctgaaggacagtgggtaactttgcctgcaccgctggacaccatcaatgtccatctgcgcgaaggctacatcataccacttcaaggtcctggactgaccactacagagtctagaaaacaaccaatggctcttgctgttgcactgactaaaagcggcgaagcaaggggtgagctgttctgggacgacggagagtcactggaggtactcgaacgaggcgcgtatacgcaggtcatttttgaggctcgcaataatacgatcgttaacgagctggtccacgtcacttcagaaggtgcaggccttcagttgggcaaggtaactgtcctgggagttgctacagcaccgcagcaggtcttgtccaacggacggcccgtaagcaactttacctatagtcctgataccaaagttctggacatctgcgttgctctgctgatgggtgagcagttcctggtatcatggtgc

SEQ ID NO: 434 - protein, 944 aa, synthetic construct
  REGION 1..944: note = Variant of the Homo Sapiens Lysosomal alpha-glucosidase
MEWSWVFLFFLSVTTGVHSGHILWHDFSTVPRELSGSSQVLEETHPAHQVGASRPGPRDAQLHPGRPRAVPTQCDVPENSRFDCAPEKAITQEQCEARGCCYIPAKQGLQGAQMGQPWCFFPPSYPSYKLENLSQSEMGYTATLTRTTPSFFPKDILTLRLDVMMETENRLHFTIKDPANRRYEVPLETPHVHSRAPSPLYSVEFSEEPFGVIVRRQLDGRVLLNTTVAPLFFADQFLQLSTSLPSQYITGLAEHLSPLMLSTSWNKITLWNRDLAPTPGANLYGSHPFYLALEDGGSAHGVFLLNSNAMDVVLQPSPALSWRSTGGILDVYIFLGPEPKSVVQQYLDVVGYPFMPPYWGLGFHLCRWGYSSTAITRQVVENMTRAHFPLDVQWNDLDYMDSRRDFTFNKDGFRDFPAMVQELHQGGRRYMMIVDPGISSSGPAGSYRPYDEGLRRGVFITNETGQPLIGKVWPGSTAFPDFTNPEALAWWEDMVAEFHDQVPFDGMWIDMNEPSNFIRGSVDGCPNNELENPPYVPGVVGGTLQAATICASSHQFLSTHYNLHNLYGTTEAIASHRALVKARGTRPFVISRSTFAGHGRYAGHWTGDVWSSWEQLASSVPEILQFNLLGVPLVGADVCGFLGNTSEELCVRWTQLGAFYPFMRNHNSLESLPQEPYSFSEPAQQAMRKALGLRYALLPHLYTLFHQAHVHGETVARPLFLEFPKDSSTWTVDHQMLWGEALLITPVLQPGKAEVTGYFPLGTWYDLQTVPVEALGSLPPPPAAPREPAIHSEGQWVTLPAPLDTINVHLREGYIIPLQGPGLTTTESRKQPMALAVALTKSGEARGELFWDDGESLEVLERGAYTQVIFEARNNTIVNELVHVTSEGAGLQLGKVTVLGVATAPQQVLSNGRPVSNFTYSPDTKVLDICVALLMGEQFLVSWC

SEQ ID NO: 435 - DNA, 2832 bp, synthetic construct
  misc_feature 1..2832: note = Variant of the Homo Sapiens Lysosomal alpha-glucosidase
  source 1..2832: mol_type = other DNA
atggaatggagctgggtctttctcttcttcctgtcagtaacgactggtgtccactccggacacattctgtggcatgatttttctaccgtgcctagagagctttccggttcaagtcaagtcctcgaagaaacacatccagcccatcaggttggcgcatctaggccgggccctcgggacgctcaactccacccagggagacctagggccgttcccactcagtgcgacgtgccagagaactcacgcttcgattgtgcacctgagaaggctatcacgcaagagcagtgcgaggcccgcggatgttgttacataccggctaaacaggggctgcagggtgcgcagatgggccaaccttggtgcttcttcccaccatcctatccgagttacaagctggagaatctctcccagtctgaaatgggatataccgcaacactgactcggaccaccccctccttctttcccaaagatatcttgactctgagacttgacgtaatgatggagacagaaaacaggctccactttaccattaaggaccctgccaatcgccgatacgaggtgcctctggaaacaccacacgtgcacagtagagctccatcacctctgtattctgtcgagttctccgaagagccgtttggcgttatcgtcaggaggcagctcgacgggcgagtgcttctgaacacgactgtggccccgttgttctttgcggatcagtttctgcaactgtcaacaagtctcccttctcagtacattaccgggcttgcagagcatctgtccccactcatgctgagtacttcatggaacaaaatcacactgtggaatagagaccttgctcctactccaggagccaacttgtatggttctcaccctttctacttggccctggaagatggcggatcagcgcatggcgtattcctcctgaattccaacgcaatggacgttgttcttcagccatctcctgctttgagttggagatctacaggcgggatactggacgtctacatctttctgggtccagagcctaaatccgtagtgcagcagtatcttgatgtcgtcggatacccgtttatgccaccatattggggcctggggttccacttgtgccgctggggatattcatccaccgccattacacgacaagttgttgagaatatgaccagggcacattttcctctggatgtacagtggaacgacctggactacatggatagtcgccgcgacttcaccttcaataaggatgggttcagagactttcctgctatggtccaagaacttcaccagggaggcaggaggtacatgatgatcgtagatccgggaatttcttcttctggcccagccggttcatacagaccgtatgacgaaggactgcgacgaggcgtctttatcacgaacgagactggtcagcctttgataggcaaggtttggccagggtccaccgctttcccggatttcacaaatcctagggcactggcctggtgggaagatatggtcgccgagtttcacgaccaggtcccatttgacgggatgtggatcgacatgaacgagccatccaacttcattagaggaagtgtggatggctgtccgaataatgagctggaaaaccctccttacgtaccaggcgttgttggtgggactcttcaagctgcgacgatttgcgcatcctcccatcagttcctgtcaacccactataacttgcacaatctgtacgggacaacagaggctatcgccagtcatagggccctggtaaaagctagaggaacacgccctttcgttatctctcgctcaacttttgcaggccacggtaggtatgccggacattggaccggcgacgtctggagttcttgggaacagctggcttcctccgttccagagatattgcagtttaacctgttgggagtcccacttgtaggtgcagatgtttgtggcttcctggggaacacctcagaagaattgtgcgtaagatggactcaactgggcgccttctacccttttatgcgcaatcacaactcactgacatctttgcctcaagaaccgtactcatttagtgagccagcacagcaggccatgaggaaggctcttggcctgagatatgcacttctgccgcatctgtacacccttttccaccaggctcatgtccatggagagactgttgcacgacctctgttcttggagttcccaaaagactcttccacgtggacagtcgatcaccagatgctgtggggcgaggctctgctgattacacctgtattgcaacctggtaaggccgaagttaccgggtactttccattggggacctggtatgatctgcaaacagtcccggttgaagctcttggaagtcttccacctccacctgctgcaccaagggagcctgcgatccactctgaaggacagtgggtaactttgcctgcaccgctggacaccatcaatgtccatctgcgcgaaggctacatcataccacttcaaggtcctggactgaccactacagagtctagaaaacaaccaatggctcttgctgttgcactgactaaaagcggcgaagcaaggggtgagctgttctgggacgacggagagtcactggaggtactcgaacgaggcgcgtatacgcaggtcatttttgaggctcgcaataatacgatcgttaacgagctggtccacgtcacttcagaaggtgcaggccttcagttgggcaaggtaactgtcctgggagttgctacagcaccgcagcaggtcttgtccaacggacggcccgtaagcaactttacctatagtcctgataccaaagttctggacatctgcgttgctctgctgatgggtgagcagttcctggtatcatggtgc

SEQ ID NO: 436 - protein, 944 aa, synthetic construct
  REGION 1..944: note = Variant of the Homo Sapiens Lysosomal alpha-glucosidase
MEWSWVFLFFLSVTTGVHSGHILWHDFSTVPRELSGSSQVLEETHPAHQVGASRPGPRDAQLHPGRPRAVPTQCDVPENSRFDCAPEKAITQEQCEARGCCYIPAKQGLQGAQMGQPWCFFPPSYPSYKLENLSQSEMGYTATLTRTTPSFFPKDILTLRLDVMMETENRLHFTIKDPANRRYEVPLETPHVHSRAPSPLYSVEFSEEPFGVIVRRQLDGRVLLNTTVAPLFFADQFLQLSTSLPSQYITGLAEHLSPLMLSTSWNKITLWNRDLAPTPGANLYGSHPFYLALEDGGSAHGVFLLNSNAMDVVLQPSPALSWRSTGGILDVYIFLGPEPKSVVQQYLDVVGYPFMPPYWGLGFHLCRWGYSSTAITRQVVENMTRAHFPLDVQWNDLDYMDSRRDFTFNKDGFRDFPAMVQELHQGGRRYMMIVDPGISSSGPAGSYRPYDEGLRRGVFITNETGQPLIGKVWPGSTAFPDFTNPRALAWWEDMVAEFHDQVPFDGMWIDMNEPSNFIRGSVDGCPNNELENPPYVPGVVGGTLQAATICASSHQFLSTHYNLHNLYGTTEAIASHRALVKARGTRPFVISRSTFAGHGRYAGHWTGDVWSSWEQLASSVPEILQFNLLGVPLVGADVCGFLGNTSEELCVRWTQLGAFYPFMRNHNSLTSLPQEPYSFSEPAQQAMRKALGLRYALLPHLYTLFHQAHVHGETVARPLFLEFPKDSSTWTVDHQMLWGEALLITPVLQPGKAEVTGYFPLGTWYDLQTVPVEALGSLPPPPAAPREPAIHSEGQWVTLPAPLDTINVHLREGYIIPLQGPGLTTTESRKQPMALAVALTKSGEARGELFWDDGESLEVLERGAYTQVIFEARNNTIVNELVHVTSEGAGLQLGKVTVLGVATAPQQVLSNGRPVSNFTYSPDTKVLDICVALLMGEQFLVSWC

SEQ ID NO: 437 - DNA, 2832 bp, synthetic construct
  misc_feature 1..2832: note = Variant of the Homo Sapiens Lysosomal alpha-glucosidase
  source 1..2832: mol_type = other DNA
atggaatggagctgggtctttctcttcttcctgtcagtaacgactggtgtccactccggacacattctgtggcatgatttttctaccgtgcctagagagctttccggttcaagtcaagtcctcgaagaaacacatccagcccatcaggttggcgcatctaggccgggccctcgggacgctcaactccacccagggagacctagggccgttcccactcagtgcgacgtgccagagaactcacgcttcgattgtgcacctgagaaggctatcacgcaagagcagtgcgaggcccgcggatgttgttacataccggctaaacaggggctgcagggtgcgcagatgggccaaccttggtgcttcttcccaccatcctatccgagttacaagctggagaatctctccgcgtctgaaatgggatataccgcaacactgactcggaccaccccctccttctttcccaaagatatcttgactctgagacttgacgtaatgatggagacagaaaacaggctccactttaccattaaggaccctgccaatcgccgatacgaggtgcctctggaaacaccacacgtgcacagtagagctccatcacctctgtattctgtcgagttctccgaagagccgtttggcgttatcgtcaggaggcagctcgacgggcgagtgcttctgaacacgactgtggccccgttgttctttgcggatcagtttctgcaactgtcaacaagtctcccttctcagtacattaccgggcttgcagagcatctgtccccactcatgctgagtacttcatggaacaaaatcacactgtggaatagagaccttgctcctactccaggagccaacttgtatggttctcaccctttctacttggccctggaagatggcggatcagcgcatggcgtattcctcctgaattccaacgcaatggacgttgttcttcagccatctcctgctttgagttggagatctacaggcgggatactggacgtctacatctttctgggtccagagcctaaatccgtagtgcagcagtatcttgatgtcgtcggatacccgtttatgccaccatattggggcctggggttccacttgtgccgctggggatattcatccaccgccattacacgacaagttgttgagaatatgaccagggcacattttcctctggatgtacagtggaacgacctggactacatggatagtcgccgcgacttcaccttcaataaggatgggttcagagactttcctgctatggtccaagaacttcaccagggaggcaggaggtacatgatgatcgtagatccgggaatttcttcttctggcccagccggttcatacagaccgtatgacgaaggactgcgacgaggcgtctttatcacgaacgagactggtcagcctttgataggcaaggtttggccagggtccaccgctttcccggatttcacaaatcctgaggcactggcctggtgggaagatatggtcgccgagtttcacgaccaggtcccatttgacgggatgtggatcgacatgaacgagccatccaacttcattagaggaagtgtggatggctgtccgaataatgagctggaaaaccctccttacgtaccaggcgttgttggtgggactcttcaagctgcgacgatttgcgcatcctcccatcagttcctgtcaacccactataacttgcacaatctgtacgggacaacagaggctatcgccagtcatagggccctggtaaaagctagaggaacacgccctttcgttatctctcgctcaacttttgcaggccacggtaggtatgccggacattggaccggcgacgtctggagttcttgggaacagctggcttcctccgttccagagatattgcagtttaacctgttgggagtcccacttgtaggtgcagatgtttgtggcttcctggggaacacctcagaagaattgtgcgtaagatggactcaactgggcgccttctacccttttatgcgcaatcacaactcactgacatctttgcctcaagaaccgtactcatttagtgagccagcacagcaggccatgaggaaggctcttggcctgagatatgcacttctgccgcatctgtacacccttttccaccaggctcatgtccatggagagactgttgcacgacctctgttcttggagttcccaaaagactcttccacgtggacagtcgatcaccagatgctgtggggcgaggctctgctgattacacctgtattgcaacctggtaaggccgaagttaccgggtactttccattggggacctggtatgatctgcaaacagtcccggttgaagctcttggaagtcttccacctccacctgctgcaccaagggagcctgcgatccactctgaaggacagtgggtaactttgcctgcaccgctggacaccatcaatgtccatctgcgcgaaggctacatcataccacttcaaggtcctggactgaccactacagagtctagaaaacaaccaatggctcttgctgttgcactgactaaaagcggcgaagcaaggggtgagctgttctgggacgacggagagtcactggaggtactcgaacgaggcgcgtatacgcaggtcatttttgaggctcgcaataatacgatcgttaacgagctggtccacgtcacttcagaaggtgcaggccttcagttgggcaaggtaactgtcctgggagttgctacagcaccgcagcaggtcttgtccaacggacggcccgtaagcaactttacctatagtcctgataccaaagttctggacatctgcgttgctctgctgatgggtgagcagttcctggtatcatggtgc

SEQ ID NO: 438 - protein, 944 aa, synthetic construct
  REGION 1..944: note = Variant of the Homo Sapiens Lysosomal alpha-glucosidase
MEWSWVFLFFLSVTTGVHSGHILWHDFSTVPRELSGSSQVLEETHPAHQVGASRPGPRDAQLHPGRPRAVPTQCDVPENSRFDCAPEKAITQEQCEARGCCYIPAKQGLQGAQMGQPWCFFPPSYPSYKLENLSASEMGYTATLTRTTPSFFPKDILTLRLDVMMETENRLHFTIKDPANRRYEVPLETPHVHSRAPSPLYSVEFSEEPFGVIVRRQLDGRVLLNTTVAPLFFADQFLQLSTSLPSQYITGLAEHLSPLMLSTSWNKITLWNRDLAPTPGANLYGSHPFYLALEDGGSAHGVFLLNSNAMDVVLQPSPALSWRSTGGILDVYIFLGPEPKSVVQQYLDVVGYPFMPPYWGLGFHLCRWGYSSTAITRQVVENMTRAHFPLDVQWNDLDYMDSRRDFTFNKDGFRDFPAMVQELHQGGRRYMMIVDPGISSSGPAGSYRPYDEGLRRGVFITNETGQPLIGKVWPGSTAFPDFTNPEALAWWEDMVAEFHDQVPFDGMWIDMNEPSNFIRGSVDGCPNNELENPPYVPGVVGGTLQAATICASSHQFLSTHYNLHNLYGTTEAIASHRALVKARGTRPFVISRSTFAGHGRYAGHWTGDVWSSWEQLASSVPEILQFNLLGVPLVGADVCGFLGNTSEELCVRWTQLGAFYPFMRNHNSLTSLPQEPYSFSEPAQQAMRKALGLRYALLPHLYTLFHQAHVHGETVARPLFLEFPKDSSTWTVDHQMLWGEALLITPVLQPGKAEVTGYFPLGTWYDLQTVPVEALGSLPPPPAAPREPAIHSEGQWVTLPAPLDTINVHLREGYIIPLQGPGLTTTESRKQPMALAVALTKSGEARGELFWDDGESLEVLERGAYTQVIFEARNNTIVNELVHVTSEGAGLQLGKVTVLGVATAPQQVLSNGRPVSNFTYSPDTKVLDICVALLMGEQFLVSWC

SEQ ID NO: 439 - DNA, 2832 bp, synthetic construct
  misc_feature 1..2832: note = Variant of the Homo Sapiens Lysosomal alpha-glucosidase
  source 1..2832: mol_type = other DNA
atggaatggagctgggtctttctcttcttcctgtcagtaacgactggtgtccactccggacacattctgtggcatgatttttctaccgtgcctagagagctttccggttcaagtattgtcctcgaagaaacacatccagcccatcaggttggcgcatctaggccgggccctcgggacgctcaactccacccagggagacctagggccgttcccactcagtgcgacgtgccagagaactcacgcttcgattgtgcacctgagaaggctatcacgcaagagcagtgcgaggcccgcggatgttgttacataccggctaaacaggggctgcagggtgcgcagatgggccaaccttggtgcttcttcccaccatcctatccgagttacaagctggagaatctctcccagtctgaaatgggatataccgcaacactgactcggaccaccccctccttctttcccaaagatatcttgactctgagacttgacgtaatgatggagacagaaaacaggctccactttaccattaaggaccctgccaatcgccgatacgaggtgcctctggaaacaccacacgtgcacagtagagctccatcacctctgtattctgtcgagttctccgaagagccgtttggcgttatcgtcaggaggcagctcgacgggcgagtgcttctgaacacgactgtggccccgttgttctttgcggatcagtttctgcaactgtcaacaagtctcccttctcagtacattaccgggcttgcagagcatctgtccccactcatgctgagtacttcatggaacaaaatcacactgtggaatagagaccttgctcctactccaggagccaacttgtatggttctcaccctttctacttggccctggaagatggcggatcagcgcatggcgtattcctcctgaattccaacgcaatggacgttgttcttcagccatctcctgctttgagttggagatctacaggcgggatactggacgtctacatctttctgggtccagagcctaaatccgtagtgcagcagtatcttgatgtcgtcggatacccgtttatgccaccatattggggcctggggttccacttgtgccgctggggatattcatccaccgccattacacgacaagttgttgagaatatgaccagggcacattttcctctggatgtacagtggaacgacctggactacatggatagtcgccgcgacttcaccttcaataaggatgggttcagagactttcctgctatggtccaagaacttcaccagggaggcaggaggtacatgatgatcgtagatccgggaatttcttcttctggcccagccggttcatacagaccgtatgacgaaggactgcgacgaggcgtctttatcacgaacgagactggtcagcctttgataggcaaggtttggccagggtccaccgctttcccggatttcacaaatcctgaggcactggcctggtgggaagatatggtcgccgagtttcacgaccaggtcccatttgacgggatgtggatcgacatgaacgagccatccaacttcattagaggaagtgtggatggctgtccgaataatgagctggaaaaccctccttacgtaccaggcgttgttggtgggactcttcaagctgcgacgatttgcgcatcctcccatcagttcctgtcaacccactataacttgcacaatctgtacgggacaacagaggctatcgccagtcatagggccctggtaaaagctagaggaacacgccctttcgttatctctcgctcaacttttgcaggccacggtaggtatgccggacattggaccggcgacgtctggagttcttgggaacagctggcttcctccgttccagagatattgcagtttaacctgttgggagtcccacttgtaggtgcagatgtttgtggcttcctggggaacacctcagaagaattgtgcgtaagatggactcaactgggcgccttctacccttttatgcgcaatcacaactcactgacatctttgcctcaagaaccgtactcatttagtgagccagcacagcaggccatgaggaaggctcttggcctgagatatgcacttctgccgcatctgtacacccttttccaccaggctcatgtccatggagagactgttgcacgacctctgttcttggagttcccaaaagactcttccacgtggacagtcgatcaccagatgctgtggggcgaggctctgctgattacacctgtattgcaacctggtaaggccgaagttaccgggtactttccattggggacctggtatgatctgcaaacagtcccggttgaagctcttggaagtcttccacctccacctgctgcaccaagggagcctgcgatccactctgaaggacagtgggtaactttgcctgcaccgctggacaccatcaatgtccatctgcgcgaaggctacatcataccacttcaaggtcctggactgaccactacagagtctagaaaacaaccaatggctcttgctgttgcactgactaaaagcggcgaagcaaggggtgagctgttctgggacgacggagagtcactggaggtactcgaacgaggcgcgtatacgcaggtcatttttgaggctcgcaataatacgatcgttaacgagctggtccacgtcacttcagaaggtgcaggccttcagttgggcaaggtaactgtcctgggagttgctacagcaccgcagcaggtcttgtccaacggacggcccgtaagcaactttacctatagtcctgataccaaagttctggacatctgcgttgctctgctgatgggtgagcagttcctggtatcatggtgc

SEQ ID NO: 440 - protein, 944 aa, synthetic construct
  REGION 1..944: note = Variant of the Homo Sapiens Lysosomal alpha-glucosidase
MEWSWVFLFFLSVTTGVHSGHILWHDFSTVPRELSGSSIVLEETHPAHQVGASRPGPRDAQLHPGRPRAVPTQCDVPENSRFDCAPEKAITQEQCEARGCCYIPAKQGLQGAQMGQPWCFFPPSYPSYKLENLSQSEMGYTATLTRTTPSFFPKDILTLRLDVMMETENRLHFTIKDPANRRYEVPLETPHVHSRAPSPLYSVEFSEEPFGVIVRRQLDGRVLLNTTVAPLFFADQFLQLSTSLPSQYITGLAEHLSPLMLSTSWNKITLWNRDLAPTPGANLYGSHPFYLALEDGGSAHGVFLLNSNAMDVVLQPSPALSWRSTGGILDVYIFLGPEPKSVVQQYLDVVGYPFMPPYWGLGFHLCRWGYSSTAITRQVVENMTRAHFPLDVQWNDLDYMDSRRDFTFNKDGFRDFPAMVQELHQGGRRYMMIVDPGISSSGPAGSYRPYDEGLRRGVFITNETGQPLIGKVWPGSTAFPDFTNPEALAWWEDMVAEFHDQVPFDGMWIDMNEPSNFIRGSVDGCPNNELENPPYVPGVVGGTLQAATICASSHQFLSTHYNLHNLYGTTEAIASHRALVKARGTRPFVISRSTFAGHGRYAGHWTGDVWSSWEQLASSVPEILQFNLLGVPLVGADVCGFLGNTSEELCVRWTQLGAFYPFMRNHNSLTSLPQEPYSFSEPAQQAMRKALGLRYALLPHLYTLFHQAHVHGETVARPLFLEFPKDSSTWTVDHQMLWGEALLITPVLQPGKAEVTGYFPLGTWYDLQTVPVEALGSLPPPPAAPREPAIHSEGQWVTLPAPLDTINVHLREGYIIPLQGPGLTTTESRKQPMALAVALTKSGEARGELFWDDGESLEVLERGAYTQVIFEARNNTIVNELVHVTSEGAGLQLGKVTVLGVATAPQQVLSNGRPVSNFTYSPDTKVLDICVALLMGEQFLVSWC

SEQ ID NO: 441 - DNA, 2832 bp, synthetic construct
  misc_feature 1..2832: note = Variant of the Homo Sapiens Lysosomal alpha-glucosidase
  source 1..2832: mol_type = other DNA
atggaatggagctgggtctttctcttcttcctgtcagtaacgactggtgtccactccggacacattctgtggcatgatttttctaccgtgcctagagagctttccggttcaagtcaagtcctcgaagaaacacatccagcccatcaggttggcgcatctaggccgggccctcgggacgctcaactccacccagggagacctagggccgttcccactcagtgcgacgtgccagagaactcacgcttcgattgtgcacctaataaggctatcacgcaagagcagtgcgaggcccgcggatgttgttacataccggctaaacaggggctgcagggtgcgcagatgggccaaccttggtgcttcttcccaccatcctatccgagttacaagctggagaatctctcccagtctgaaatgggatataccgcaacactgactcggaccaccccctccttctttcccaaagatatcttgactctgagacttgacgtaatgatggagacagaaaacaggctccactttaccattaaggaccctgccaatcgccgatacgaggtgcctctggaaacaccacacgtgcacagtagagctccatcacctctgtattctgtcgagttctccgaagagccgtttggcgttatcgtcaggaggcagctcgacgggcgagtgcttctgaacacgactgtggccccgttgttctttgcggatcagtttctgcaactgtcaacaagtctcccttctcagtacattaccgggcttgcagagcatctgtccccactcatgctgagtacttcatggaacaaaatcacactgtggaatagagaccttgctcctactccaggagccaacttgtatggttctcaccctttctacttggccctggaagatggcggatcagcgcatggcgtattcctcctgaattccaacgcaatggacgttgttcttcagccatctcctgctttgagttggagatctacaggcgggatactggacgtctacatctttctgggtccagagcctaaatccgtagtgcagcagtatcttgatgtcgtcggatacccgtttatgccaccatattggggcctggggttccacttgtgccgctggggatattcatccaccgccattacacgacaagttgttgagaatatgaccagggcacattttcctctggatgtacagtggaacgacctggactacatggatagtcgccgcgacttcaccttcaataaggatgggttcagagactttcctgctatggtccaagaacttcaccagggaggcaggaggtacatgatgatcgtagatccgggaatttcttcttctggcccagccggttcatacagaccgtatgacgaaggactgcgacgaggcgtctttatcacgaacgagactggtcagcctttgataggcaaggtttggccagggtccaccgctttcccggatttcacaaatcctgaggcactggcctggtgggaagatatggtcgccgagtttcacgaccaggtcccatttgacgggatgtggatcgacatgaacgagccatccaacttcattagaggaagtgtggatggctgtccgaataatgagctggaaaaccctccttacgtaccaggcgttgttggtgggactcttcaagctgcgacgatttgcgcatcctcccatcagttcctgtcaacccactataacttgcacaatctgtacgggacaacagaggctatcgccagtcatagggccctggtaaaagctagaggaacacgccctttcgttatctctcgctcaacttttgcaggccacggtaggtatgccggacattggaccggcgacgtctggagttcttgggaacagctggcttcctccgttccagagatattgcagtttaacctgttgggagtcccacttgtaggtgcagatgtttgtggcttcctggggaacacctcagaagaattgtgcgtaagatggactcaactgggcgccttctacccttttatgcgcaatcacaactcactgacatctttgcctcaagaaccgtactcatttagtgagccagcacagcaggccatgaggaaggctcttggcctgagatatgcacttctgccgcatctgtacacccttttccaccaggctcatgtccatggagagactgttgcacgacctctgttcttggagttcccaaaagactcttccacgtggacagtcgatcaccagatgctgtggggcgaggctctgctgattacacctgtattgcaacctggtaaggccgaagttaccgggtactttccattggggacctggtatgatctgcaaacagtcccggttgaagctcttggaagtcttccacctccacctgctgcaccaagggagcctgcgatccactctgaaggacagtgggtaactttgcctgcaccgctggacaccatcaatgtccatctgcgcgaaggctacatcataccacttcaaggtcctggactgaccactacagagtctagaaaacaaccaatggctcttgctgttgcactgactaaaagcggcgaagcaaggggtgagctgttctgggacgacggagagtcactggaggtactcgaacgaggcgcgtatacgcaggtcatttttgaggctcgcaataatacgatcgttaacgagctggtccacgtcacttcagaaggtgcaggccttcagttgggcaaggtaactgtcctgggagttgctacagcaccgcagcaggtcttgtccaacggacggcccgtaagcaactttacctatagtcctgataccaaagttctggacatctgcgttgctctgctgatgggtgagcagttcctggtatcatggtgc

SEQ ID NO: 442 - protein, 944 aa, synthetic construct
  REGION 1..944: note = Variant of the Homo Sapiens Lysosomal alpha-glucosidase
MEWSWVFLFFLSVTTGVHSGHILWHDFSTVPRELSGSSQVLEETHPAHQVGASRPGPRDAQLHPGRPRAVPTQCDVPENSRFDCAPNKAITQEQCEARGCCYIPAKQGLQGAQMGQPWCFFPPSYPSYKLENLSQSEMGYTATLTRTTPSFFPKDILTLRLDVMMETENRLHFTIKDPANRRYEVPLETPHVHSRAPSPLYSVEFSEEPFGVIVRRQLDGRVLLNTTVAPLFFADQFLQLSTSLPSQYITGLAEHLSPLMLSTSWNKITLWNRDLAPTPGANLYGSHPFYLALEDGGSAHGVFLLNSNAMDVVLQPSPALSWRSTGGILDVYIFLGPEPKSVVQQYLDVVGYPFMPPYWGLGFHLCRWGYSSTAITRQVVENMTRAHFPLDVQWNDLDYMDSRRDFTFNKDGFRDFPAMVQELHQGGRRYMMIVDPGISSSGPAGSYRPYDEGLRRGVFITNETGQPLIGKVWPGSTAFPDFTNPEALAWWEDMVAEFHDQVPFDGMWIDMNEPSNFIRGSVDGCPNNELENPPYVPGVVGGTLQAATICASSHQFLSTHYNLHNLYGTTEAIASHRALVKARGTRPFVISRSTFAGHGRYAGHWTGDVWSSWEQLASSVPEILQFNLLGVPLVGADVCGFLGNTSEELCVRWTQLGAFYPFMRNHNSLTSLPQEPYSFSEPAQQAMRKALGLRYALLPHLYTLFHQAHVHGETVARPLFLEFPKDSSTWTVDHQMLWGEALLITPVLQPGKAEVTGYFPLGTWYDLQTVPVEALGSLPPPPAAPREPAIHSEGQWVTLPAPLDTINVHLREGYIIPLQGPGLTTTESRKQPMALAVALTKSGEARGELFWDDGESLEVLERGAYTQVIFEARNNTIVNELVHVTSEGAGLQLGKVTVLGVATAPQQVLSNGRPVSNFTYSPDTKVLDICVALLMGEQFLVSWC

SEQ ID NO: 443 - DNA, 2832 bp, synthetic construct
  misc_feature 1..2832: note = Variant of the Homo Sapiens Lysosomal alpha-glucosidase
  source 1..2832: mol_type = other DNA
atggaatggagctgggtctttctcttcttcctgtcagtaacgactggtgtccactccggacacattctgtggcatgatttttctaccgtgcctagagagctttccggttcaagtcaagtcctcgaagaaacacatccagcccatcaggttggcgcatctaggccgggccctcgggacgctcaactccacccagggagacctagggccgttcccactcagtgcgacgtgccagagaactcacgcttcgattgtgcacctatgaaggctatcacgcaagagcagtgcgaggcccgcggatgttgttacataccggctaaacaggggctgcagggtgcgcagatgggccaaccttggtgcttcttcccaccatcctatccgagttacaagctggagaatctctcccagtctgaaatgggatataccgcaacactgactcggaccaccccctccttctttcccaaagatatcttgactctgagacttgacgtaatgatggagacagaaaacaggctccactttaccattaaggaccctgccaatcgccgatacgaggtgcctctggaaacaccacacgtgcacagtagagctccatcacctctgtattctgtcgagttctccgaagagccgtttggcgttatcgtcaggaggcagctcgacgggcgagtgcttctgaacacgactgtggccccgttgttctttgcggatcagtttctgcaactgtcaacaagtctcccttctcagtacattaccgggcttgcagagcatctgtccccactcatgctgagtacttcatggaacaaaatcacactgtggaatagagaccttgctcctactccaggagccaacttgtatggttctcaccctttctacttggccctggaagatggcggatcagcgcatggcgtattcctcctgaattccaacgcaatggacgttgttcttcagccatctcctgctttgagttggagatctacaggcgggatactggacgtctacatctttctgggtccagagcctaaatccgtagtgcagcagtatcttgatgtcgtcggatacccgtttatgccaccatattggggcctggggttccacttgtgccgctggggatattcatccaccgccattacacgacaagttgttgagaatatgaccagggcacattttcctctggatgtacagtggaacgacctggactacatggatagtcgccgcgacttcaccttcaataaggatgggttcagagactttcctgctatggtccaagaacttcaccagggaggcaggaggtacatgatgatcgtagatccgggaatttcttcttctggcccagccggttcatacagaccgtatgacgaaggactgcgacgaggcgtctttatcacgaacgagactggtcagcctttgataggcaaggtttggccagggtccaccgctttcccggatttcacaaatcctgaggcactggcctggtgggaagatatggtcgccgagtttcacgaccaggtcccatttgacgggatgtggatcgacatgaacgagccatccaacttcattagaggaagtgtggatggctgtccgaataatgagctggaaaaccctccttacgtaccaggcgttgttggtgggactcttcaagctgcgacgatttgcgcatcctcccatcagttcctgtcaacccactataacttgcacaatctgtacgggacaacagaggctatcgccagtcatagggccctggtaaaagctagaggaacacgccctttcgttatctctcgctcaacttttgcaggccacggtaggtatgccggacattggaccggcgacgtctggagttcttgggaacagctggcttcctccgttccagagatattgcagtttaacctgttgggagtcccacttgtaggtgcagatgtttgtggcttcctggggaacacctcagaagaattgtgcgtaagatggactcaactgggcgccttctacccttttatgcgcaatcacaactcactgacatctttgcctcaagaaccgtactcatttagtgagccagcacagcaggccatgaggaaggctcttggcctgagatatgcacttctgccgcatctgtacacccttttccaccaggctcatgtccatggagagactgttgcacgacctctgttcttggagttcccaaaagactcttccacgtggacagtcgatcaccagatgctgtggggcgaggctctgctgattacacctgtattgcaacctggtaaggccgaagttaccgggtactttccattggggacctggtatgatctgcaaacagtcccggttgaagctcttggaagtcttccacctccacctgctgcaccaagggagcctgcgatccactctgaaggacagtgggtaactttgcctgcaccgctggacaccatcaatgtccatctgcgcgaaggctacatcataccacttcaaggtcctggactgaccactacagagtctagaaaacaaccaatggctcttgctgttgcactgactaaaagcggcgaagcaaggggtgagctgttctgggacgacggagagtcactggaggtactcgaacgaggcgcgtatacgcaggtcatttttgaggctcgcaataatacgatcgttaacgagctggtccacgtcacttcagaaggtgcaggccttcagttgggcaaggtaactgtcctgggagttgctacagcaccgcagcaggtcttgtccaacggacggcccgtaagcaactttacctatagtcctgataccaaagttctggacatctgcgttgctctgctgatgggtgagcagttcctggtatcatggtgc

SEQ ID NO: 444 - protein, 944 aa, synthetic construct
  REGION 1..944: note = Variant of the Homo Sapiens Lysosomal alpha-glucosidase
MEWSWVFLFFLSVTTGVHSGHILWHDFSTVPRELSGSSQVLEETHPAHQVGASRPGPRDAQLHPGRPRAVPTQCDVPENSRFDCAPMKAITQEQCEARGCCYIPAKQGLQGAQMGQPWCFFPPSYPSYKLENLSQSEMGYTATLTRTTPSFFPKDILTLRLDVMMETENRLHFTIKDPANRRYEVPLETPHVHSRAPSPLYSVEFSEEPFGVIVRRQLDGRVLLNTTVAPLFFADQFLQLSTSLPSQYITGLAEHLSPLMLSTSWNKITLWNRDLAPTPGANLYGSHPFYLALEDGGSAHGVFLLNSNAMDVVLQPSPALSWRSTGGILDVYIFLGPEPKSVVQQYLDVVGYPFMPPYWGLGFHLCRWGYSSTAITRQVVENMTRAHFPLDVQWNDLDYMDSRRDFTFNKDGFRDFPAMVQELHQGGRRYMMIVDPGISSSGPAGSYRPYDEGLRRGVFITNETGQPLIGKVWPGSTAFPDFTNPEALAWWEDMVAEFHDQVPFDGMWIDMNEPSNFIRGSVDGCPNNELENPPYVPGVVGGTLQAATICASSHQFLSTHYNLHNLYGTTEAIASHRALVKARGTRPFVISRSTFAGHGRYAGHWTGDVWSSWEQLASSVPEILQFNLLGVPLVGADVCGFLGNTSEELCVRWTQLGAFYPFMRNHNSLTSLPQEPYSFSEPAQQAMRKALGLRYALLPHLYTLFHQAHVHGETVARPLFLEFPKDSSTWTVDHQMLWGEALLITPVLQPGKAEVTGYFPLGTWYDLQTVPVEALGSLPPPPAAPREPAIHSEGQWVTLPAPLDTINVHLREGYIIPLQGPGLTTTESRKQPMALAVALTKSGEARGELFWDDGESLEVLERGAYTQVIFEARNNTIVNELVHVTSEGAGLQLGKVTVLGVATAPQQVLSNGRPVSNFTYSPDTKVLDICVALLMGEQFLVSWC

SEQ ID NO: 445 - DNA, 2832 bp, synthetic construct
  misc_feature 1..2832: note = Variant of the Homo Sapiens Lysosomal alpha-glucosidase
  source 1..2832: mol_type = other DNA
atggaatggagctgggtctttctcttcttcctgtcagtaacgactggtgtccactccggacacattctgtggcatgatttttctaccgtgcctagagagctttccggttcaagtcaagtcctcgaagaaacacatccagcccatcaggttggcgcatctaggccgggccctcgggacgctcaactccacccagggagacctagggccgttcccactcagtgcgacgtgccagagaactcacgcttcgattgtgcacctgagaaggctatcacgcaagagcagtgcgaggcccgcggatgttgttacataccggctaaacaggggctgcagggtgcgcagatgggccaaccttggtgcttcttcccaccatcctatccgagttacaagctggagaatctctcctgttctgaaatgggatataccgcaacactgactcggaccaccccctccttctttcccaaagatatcttgactctgagacttgacgtaatgatggagacagaaaacaggctccactttaccattaaggaccctgccaatcgccgatacgaggtgcctctggaaacaccacacgtgcacagtagagctccatcacctctgtattctgtcgagttctccgaagagccgtttggcgttatcgtcaggaggcagctcgacgggcgagtgcttctgaacacgactgtggccccgttgttctttgcggatcagtttctgcaactgtcaacaagtctcccttctcagtacattaccgggcttgcagagcatctgtccccactcatgctgagtacttcatggaacaaaatcacactgtggaatagagaccttgctcctactccaggagccaacttgtatggttctcaccctttctacttggccctggaagatggcggatcagcgcatggcgtattcctcctgaattccaacgcaatggacgttgttcttcagccatctcctgctttgagttggagatctacaggcgggatactggacgtctacatctttctgggtccagagcctaaatccgtagtgcagcagtatcttgatgtcgtcggatacccgtttatgccaccatattggggcctggggttccacttgtgccgctggggatattcatccaccgccattacacgacaagttgttgagaatatgaccagggcacattttcctctggatgtacagtggaacgacctggactacatggatagtcgccgcgacttcaccttcaataaggatgggttcagagactttcctgctatggtccaagaacttcaccagggaggcaggaggtacatgatgatcgtagatccgggaatttcttcttctggcccagccggttcatacagaccgtatgacgaaggactgcgacgaggcgtctttatcacgaacgagactggtcagcctttgataggcaaggtttggccagggtccaccgctttcccggatttcacaaatcctgaggcactggcctggtgggaagatatggtcgccgagtttcacgaccaggtcccatttgacgggatgtggatcgacatgaacgagccatccaacttcattagaggaagtgtggatggctgtccgaataatgagctggaaaaccctccttacgtaccaggcgttgttggtgggactcttcaagctgcgacgatttgcgcatcctcccatcagttcctgtcaacccactataacttgcacaatctgtacgggacaacagaggctatcgccagtcatagggccctggtaaaagctagaggaacacgccctttcgttatctctcgctcaacttttgcaggccacggtaggtatgccggacattggaccggcgacgtctggagttcttgggaacagctggcttcctccgttccagagatattgcagtttaacctgttgggagtcccacttgtaggtgcagatgtttgtggcttcctggggaacacctcagaagaattgtgcgtaagatggactcaactgggcgccttctacccttttatgcgcaatcacaactcactgacatctttgcctcaagaaccgtactcatttagtgagccagcacagcaggccatgaggaaggctcttggcctgagatatgcacttctgccgcatctgtacacccttttccaccaggctcatgtccatggagagactgttgcacgacctctgttcttggagttcccaaaagactcttccacgtggacagtcgatcaccagatgctgtggggcgaggctctgctgattacacctgtattgcaacctggtaaggccgaagttaccgggtactttccattggggacctggtatgatctgcaaacagtcccggttgaagctcttggaagtcttccacctccacctgctgcaccaagggagcctgcgatccactctgaaggacagtgggtaactttgcctgcaccgctggacaccatcaatgtccatctgcgcgaaggctacatcataccacttcaaggtcctggactgaccactacagagtctagaaaacaaccaatggctcttgctgttgcactgactaaaagcggcgaagcaaggggtgagctgttctgggacgacggagagtcactggaggtactcgaacgaggcgcgtatacgcaggtcatttttgaggctcgcaataatacgatcgttaacgagctggtccacgtcacttcagaaggtgcaggccttcagttgggcaaggtaactgtcctgggagttgctacagcaccgcagcaggtcttgtccaacggacggcccgtaagcaactttacctatagtcctgataccaaagttctggacatctgcgttgctctgctgatgggtgagcagttcctggtatcatggtgc

SEQ ID NO: 446 - protein, 944 aa, synthetic construct
  REGION 1..944: note = Variant of the Homo Sapiens Lysosomal alpha-glucosidase
MEWSWVFLFFLSVTTGVHSGHILWHDFSTVPRELSGSSQVLEETHPAHQVGASRPGPRDAQLHPGRPRAVPTQCDVPENSRFDCAPEKAITQEQCEARGCCYIPAKQGLQGAQMGQPWCFFPPSYPSYKLENLSCSEMGYTATLTRTTPSFFPKDILTLRLDVMMETENRLHFTIKDPANRRYEVPLETPHVHSRAPSPLYSVEFSEEPFGVIVRRQLDGRVLLNTTVAPLFFADQFLQLSTSLPSQYITGLAEHLSPLMLSTSWNKITLWNRDLAPTPGANLYGSHPFYLALEDGGSAHGVFLLNSNAMDVVLQPSPALSWRSTGGILDVYIFLGPEPKSVVQQYLDVVGYPFMPPYWGLGFHLCRWGYSSTAITRQVVENMTRAHFPLDVQWNDLDYMDSRRDFTFNKDGFRDFPAMVQELHQGGRRYMMIVDPGISSSGPAGSYRPYDEGLRRGVFITNETGQPLIGKVWPGSTAFPDFTNPEALAWWEDMVAEFHDQVPFDGMWIDMNEPSNFIRGSVDGCPNNELENPPYVPGVVGGTLQAATICASSHQFLSTHYNLHNLYGTTEAIASHRALVKARGTRPFVISRSTFAGHGRYAGHWTGDVWSSWEQLASSVPEILQFNLLGVPLVGADVCGFLGNTSEELCVRWTQLGAFYPFMRNHNSLTSLPQEPYSFSEPAQQAMRKALGLRYALLPHLYTLFHQAHVHGETVARPLFLEFPKDSSTWTVDHQMLWGEALLITPVLQPGKAEVTGYFPLGTWYDLQTVPVEALGSLPPPPAAPREPAIHSEGQWVTLPAPLDTINVHLREGYIIPLQGPGLTTTESRKQPMALAVALTKSGEARGELFWDDGESLEVLERGAYTQVIFEARNNTIVNELVHVTSEGAGLQLGKVTVLGVATAPQQVLSNGRPVSNFTYSPDTKVLDICVALLMGEQFLVSWC

SEQ ID NO: 447 - DNA, 2832 bp, synthetic construct
  misc_feature 1..2832: note = Variant of the Homo Sapiens Lysosomal alpha-glucosidase
  source 1..2832: mol_type = other DNA
atggaatggagctgggtctttctcttcttcctgtcagtaacgactggtgtccactccggacacattctgtggcatgatttttctaccgtgcctagagagctttccggttcaagtcaagtcctcgaagaaacacatccagcccatcaggttggcgcatctaggccgggccctcgggacgctcaactccacccagggagacctagggccgttcccactcagtgcgacgtgccagagaactcacgcttcgattgtgcacctgagaaggctatcacgcaagagcagtgcgaggcccgcggatgttgttacataccggctaaacaggggctgcagggtgcgcagatgggccaaccttggtgcttcttcccaccatcctatccgagttacaagctggagaatctctcccagtctgaaatgggatataccgcaacactgactcggaccaccccctccttctttcccaaagatatcttgactctgagacttgacgtaatgatggagacagaaaacaggctccactttaccattaaggaccctgccaatcgccgatacgaggtgcctctggaaacaccacacgtgcacagtagagctccatcacctctgtattctgtcgagttctccgaagagccgtttggcgttatcgtcaggaggcagctcgacgggcgagtgcttctgaacacgactgtggccccgttgttctttgcggatcagtttctgcaactgtcaacaagtctcccttctcagtacattaccgggcttgcagagcatctgtccccactcatgctgagtacttcatggaacaaaatcacactgtggaatagagaccttgctcctactccaggagccaacttgtatggttctcaccctttctacttggccctggaagatggcggatcagcgcatggcgtattcctcctgaattccaacgcaatggacgttgttcttcagccatctcctgctttgagttggagatctacaggcgggatactggacgtctacatctttctgggtccagagcctaaatccgtagtgcagcagtatcttgatgtcgtcggatacccgtttatgccaccatattggggcctggggttccacttgtgccgctggggatattcatccaccgccattacacgacaagttgttgagaatatgaccagggcacattttcctctggatgtacagtggaacgacctggactacatggatagtcgccgcgacttcaccttcaataaggatgggttcagagactttcctgctatggtccaagaacttcaccagggaggcaggaggtacatgatgatcgtagatccgggaatttcttcttctggcccagccggttcatacagaccgtatgacgaaggactgcgacgaggcgtctttatcacgaacgagactggtcagcctttgataggcaaggtttggccagggtccaccgctttcccggatttcacaaatcctgaggcactggcctggtgggaagatatggtcgccgagtttcacgaccaggtcccatttgacgggatgtggatcgacatgaacgagccatccaacttcattagaggaagtgtggatggctgtccgaataatgagctggaaaaccctccttacgtaccaggcgttgttggtgggactcttcaagctgcgacgatttgcgcatcctcccatcagttcctgtcaacccactataacttgcacaatctgtacgggacaacagaggctatcgccagtcatagggccctggtaaaagctagaggaacacgccctttcgttatctctcgctcaacttttgcaggccacggtaggtatgccggacattggaccggcgacgtctggagttcttgggaacagctggcttcctccgttccagagatattgcagtttaacctgttgggagtcccacttgtaggtgcagatgtttgtggcttcctggggaacacctcagaagaattgtgcgtaagatggactcaactgggcgccttctacccttttatgcgcaatcacaactcactgacatctttgcctcaagaaccgtactcatttagtgagccagcacagcaggccatgaggaaggctcttggcctgagatatgcacttctgccgcatctgtacacccttttccaccaggctcatgtccatggagagactgttgcacgacctctgttcttggagttcccaaaagactcttccacgtggacagtcgatcaccagatgctgtggggcgaggctctgctgattacacctgtattgcaacctggtaaggccgaagttaccgggtactttccattggggacctggtatgatctgcaaacagtcccggttgaagctcttggaagtcttccacctccacctgctgcaccaagggagcctgcgatccactctgaaggacagtgggtaactttgcctgcaccgctggacaccatcaatgtccatctgcgcgaaggctacatcataccacttcaaggtcctggactgaccactacagagtctagaaaacaaccaatggctcttgctgttgcactgactaaaagcggcgaagcaaggggtgagctgttctgggacgacggagagtcactggaggtactcgaacgaggcgcgtatacgcaggtcatttttgaggctcgcaataatacgatcgttaacgagctggtccacgtcacttcagaaggtgcaggccttcagttgggcaaggtaactgtcctgggagttgctacagcaccgcagcaggtcttgtccaacggacggcccgtaagcaactttacctatagtcctgataccaaagttctggacatctgcgttcttctgctgatgggtgagcagttcctggtatcatggtgc

SEQ ID NO: 448 - protein, 944 aa, synthetic construct
  REGION 1..944: note = Variant of the Homo Sapiens Lysosomal alpha-glucosidase
MEWSWVFLFFLSVTTGVHSGHILWHDFSTVPRELSGSSQVLEETHPAHQVGASRPGPRDAQLHPGRPRAVPTQCDVPENSRFDCAPEKAITQEQCEARGCCYIPAKQGLQGAQMGQPWCFFPPSYPSYKLENLSQSEMGYTATLTRTTPSFFPKDILTLRLDVMMETENRLHFTIKDPANRRYEVPLETPHVHSRAPSPLYSVEFSEEPFGVIVRRQLDGRVLLNTTVAPLFFADQFLQLSTSLPSQYITGLAEHLSPLMLSTSWNKITLWNRDLAPTPGANLYGSHPFYLALEDGGSAHGVFLLNSNAMDVVLQPSPALSWRSTGGILDVYIFLGPEPKSVVQQYLDVVGYPFMPPYWGLGFHLCRWGYSSTAITRQVVENMTRAHFPLDVQWNDLDYMDSRRDFTFNKDGFRDFPAMVQELHQGGRRYMMIVDPGISSSGPAGSYRPYDEGLRRGVFITNETGQPLIGKVWPGSTAFPDFTNPEALAWWEDMVAEFHDQVPFDGMWIDMNEPSNFIRGSVDGCPNNELENPPYVPGVVGGTLQAATICASSHQFLSTHYNLHNLYGTTEAIASHRALVKARGTRPFVISRSTFAGHGRYAGHWTGDVWSSWEQLASSVPEILQFNLLGVPLVGADVCGFLGNTSEELCVRWTQLGAFYPFMRNHNSLTSLPQEPYSFSEPAQQAMRKALGLRYALLPHLYTLFHQAHVHGETVARPLFLEFPKDSSTWTVDHQMLWGEALLITPVLQPGKAEVTGYFPLGTWYDLQTVPVEALGSLPPPPAAPREPAIHSEGQWVTLPAPLDTINVHLREGYIIPLQGPGLTTTESRKQPMALAVALTKSGEARGELFWDDGESLEVLERGAYTQVIFEARNNTIVNELVHVTSEGAGLQLGKVTVLGVATAPQQVLSNGRPVSNFTYSPDTKVLDICVLLLMGEQFLVSWC

SEQ ID NO: 449 - DNA, 2832 bp, synthetic construct
  misc_feature 1..2832: note = Variant of the Homo Sapiens Lysosomal alpha-glucosidase
  source 1..2832: mol_type = other DNA
atggaatggagctgggtctttctcttcttcctgtcagtaacgactggtgtccactccggacacattctgtggcatgatttttctaccgtgcctagagagctttccggttcaagtcaagtcctcgaagaaacacatccagcccatcaggttggcgcatctaggccgggccctcgggacgctcaactccacccagggagacctagggccgttcccactcagtgcgacgtgccagagaactcacgcttcgattgtgcacctgagaaggctatcacgcaagagcagtgcgaggcccgcggatgttgttacataccggctaaacaggggctgcagggtgcgcagatgggccaaccttggtgcttcttcccaccatcctatccgagttacaagctggagaatctctcccagtctgaaatgggatataccgcaacactgactcggaccaccccctccttctttcccaaagatatcttgactctgagacttgacgtaatgatggagacagaaaacaggctccactttaccattaaggaccctgccaatcgccgatacgaggtgcctctggaaacaccacacgtgcacagtagagctccatcacctctgtattctgtcgagttctccgaagagccgtttggcgttatcgtcaggaggcagctcgacgggcgagtgcttctgaacacgactgtggccccgttgttctttgcggatcagtttctgcaactgtcaacaagtctcccttctcagtacattaccgggcttgcagagcatctgtccccactcatgctgagtacttcatggaacaaaatcacactgtggaatagagaccttgctcctactccaggagccaacttgtatggttctcaccctttctacttggccctggaagatggcggatcagcgcatggcgtattcctcctgaattccaacgcaatggacgttgttcttcagccatctcctgctttgagttggagatctacaggcgggatactggacgtctacatctttctgggtccagagcctaaatccgtagtgcagcagtatcttgatgtcgtcggatacccgtttatgccaccatattggggcctggggttccacttgtgccgctggggatattcatccaccgccattacacgacaagttgttgagaatatgaccagggcacattttcctctggatgtacagtggaacgacctggactacatggatagtcgccgcgacttcaccttcaataaggatgggttcagagactttcctgctatggtccaagaacttcaccagggaggcaggaggtacatgatgatcgtagatccgggaatttcttcttctggcccagccggttcatacagaccgtatgacgaaggactgcgacgaggcgtctttatcacgaacgagactggtcagcctttgataggcaaggtttggccagggtccaccgctttcccggatttcacaaatcctgaggcactggcctggtgggaagatatggtcgccgagtttcacgaccaggtcccatttgacgggatgtggatcgacatgaacgagccatccaacttcattagaggaagtgtggatggctgtccgaataatgagctggaaaaccctccttacgtaccaggcgttgttggtgggactcttcaagctgcgacgatttgcgcatcctcccatcagttcctgtcaacccactataacttgcacaatctgtacgggacaacagaggctatcgccagtcatagggccctggtaaaagctagaggaacacgccctttcgttatctctcgctcaacttttgcaggccacggtaggtatgccggacattggaccggcgacgtctggagttcttgggaacagctggcttcctccgttccagagatattgcagtttaacctgttgggagtcccacttgtaggtgcagatgtttgtggcttcctggggaacacctcagaagaattgtgcgtaagatggactcaactgggcgccttctacccttttatgcgcaatcacaactcactggggtctttgcctcaagaaccgtactcatttagtgagccagcacagcaggccatgaggaaggctcttggcctgagatatgcacttctgccgcatctgtacacccttttccaccaggctcatgtccatggagagactgttgcacgacctctgttcttggagttcccaaaagactcttccacgtggacagtcgatcaccagatgctgtggggcgaggctctgctgattacacctgtattgcaacctggtaaggccgaagttaccgggtactttccattggggacctggtatgatctgcaaacagtcccggttgaagctcttggaagtcttccacctccacctgctgcaccaagggagcctgcgatccactctgaaggacagtgggtaactttgcctgcaccgctggacaccatcaatgtccatctgcgcgaaggctacatcataccacttcaaggtcctggactgaccactacagagtctagaaaacaaccaatggctcttgctgttgcactgactaaaagcggcgaagcaaggggtgagctgttctgggacgacggagagtcactggaggtactcgaacgaggcgcgtatacgcaggtcatttttgaggctcgcaataatacgatcgttaacgagctggtccacgtcacttcagaaggtgcaggccttcagttgggcaaggtaactgtcctgggagttgctacagcaccgcagcaggtcttgtccaacggacggcccgtaagcaactttacctatagtcctgataccaaagttctggacatctgcgttgctctgctgatgggtgagcagttcctggtatcatggtgc

SEQ ID NO: 450 - protein, 944 aa, synthetic construct
  REGION 1..944: note = Variant of the Homo Sapiens Lysosomal alpha-glucosidase
MEWSWVFLFFLSVTTGVHSGHILWHDFSTVPRELSGSSQVLEETHPAHQVGASRPGPRDAQLHPGRPRAVPTQCDVPENSRFDCAPEKAITQEQCEARGCCYIPAKQGLQGAQMGQPWCFFPPSYPSYKLENLSQSEMGYTATLTRTTPSFFPKDILTLRLDVMMETENRLHFTIKDPANRRYEVPLETPHVHSRAPSPLYSVEFSEEPFGVIVRRQLDGRVLLNTTVAPLFFADQFLQLSTSLPSQYITGLAEHLSPLMLSTSWNKITLWNRDLAPTPGANLYGSHPFYLALEDGGSAHGVFLLNSNAMDVVLQPSPALSWRSTGGILDVYIFLGPEPKSVVQQYLDVVGYPFMPPYWGLGFHLCRWGYSSTAITRQVVENMTRAHFPLDVQWNDLDYMDSRRDFTFNKDGFRDFPAMVQELHQGGRRYMMIVDPGISSSGPAGSYRPYDEGLRRGVFITNETGQPLIGKVWPGSTAFPDFTNPEALAWWEDMVAEFHDQVPFDGMWIDMNEPSNFIRGSVDGCPNNELENPPYVPGVVGGTLQAATICASSHQFLSTHYNLHNLYGTTEAIASHRALVKARGTRPFVISRSTFAGHGRYAGHWTGDVWSSWEQLASSVPEILQFNLLGVPLVGADVCGFLGNTSEELCVRWTQLGAFYPFMRNHNSLGSLPQEPYSFSEPAQQAMRKALGLRYALLPHLYTLFHQAHVHGETVARPLFLEFPKDSSTWTVDHQMLWGEALLITPVLQPGKAEVTGYFPLGTWYDLQTVPVEALGSLPPPPAAPREPAIHSEGQWVTLPAPLDTINVHLREGYIIPLQGPGLTTTESRKQPMALAVALTKSGEARGELFWDDGESLEVLERGAYTQVIFEARNNTIVNELVHVTSEGAGLQLGKVTVLGVATAPQQVLSNGRPVSNFTYSPDTKVLDICVALLMGEQFLVSWC

SEQ ID NO: 451 - DNA, 2832 bp, synthetic construct
  misc_feature 1..2832: note = Variant of the Homo Sapiens Lysosomal alpha-glucosidase
  source 1..2832: mol_type = other DNA
atggaatggagctgggtctttctcttcttcctgtcagtaacgactggtgtccactccggacacattctgtggcatgatttttctaccgtgcctagagagctttccggttcaagtcaagtcctcgaagaaacacatccagcccatcaggttggcgcatctaggccgggccctcgggacgctcaactccacccagggagacctagggccgttcccactcagtgcgacgtgccagagaactcacgcttcgattgtgcacctgagaaggctatcacgcaagagcagtgcgaggcccgcggatgttgttacataccggctaaacaggggctgcagggtgcgcagatgggccaaccttggtgcttcttcccaccatcctatccgagttacaagctggagaatctctcccagtctgaaatgggatataccgcaacactgactcggaccaccccctccttctttcccaaagatatcttgactctgagacttgacgtaatgatggagacagaaaacaggctccactttaccattaaggaccctgccaatcgccgatacgaggtgcctctggaaacaccacacgtgcacagtagagctccatcacctctgtattctgtcgagttctccgaagagccgtttggcgttatcgtcaggaggcagctcgacgggcgagtgcttctgaacacgactgtggccccgttgttctttgcggatcagtttctgcaactgtcaacaagtctcccttctcagtacattaccgggcttgcagagcatctgtccccactcatgctgagtacttcatggaacaaaatcacactgtggaatagagaccttgctcctactccaggagccaacttgtatggttctcaccctttctacttggccctggaagatggcggatcagcgcatggcgtattcctcctgaattccaacgcaatggacgttgttcttcagccatctcctgctttgagttggagatctacaggcgggatactggacgtctacatctttctgggtccagagcctaaatccgtagtgcagcagtatcttgatgtcgtcggatacccgtttatgccaccatattggggcctggggttccacttgtgccgctggggatattcatccaccgccattacacgacaagttgttgagaatatgaccagggcacattttcctctggatgtacagtggaacgacctggactacatggatagtcgccgcgacttcaccttcaataaggatgggttcagagactttcctgctatggtccaagaacttcaccagggaggcaggaggtacatgatgatcgtagatccgggaatttcttcttctggcccagccggttcatacagaccgtatgacgaaggactgcgacgaggcgtctttatcacgaacgagactggtcagcctttgataggcaaggtttggccagggtccaccgctttcccggatttcacaaatcctgaggcactggcctggtgggaagatatggtcgccgagtttcacgaccaggtcccatttgacgggatgtggatcgacatgaacgagccatccaacttcattagaggaagtgtggatggctgtccgaataatgagctggaaaaccctccttacgtaccaggcgttgttggtgggactcttcaagctgcgacgatttgcgcatcctcccatcagttcctgtcaacccactataacttgcacaatctgtacgggacaacagaggctatcgccagtcatagggccctggtaaaagctagaggaacacgccctttcgttatctctcgctcaacttttgcaggccacggtaggtatgccggacattggaccggcgacgtctggagttcttgggaacagctggcttcctccgttccagagatattgcagtttaacctgttgggagtcccacttgtaggtgcagatgtttgtggcttcctggggaacacctcagaagaattgtgcgtaagatggactcaactgggcgccttctacccttttatgcgcaatcacaactcactgacatctttgcctcaagaaccgtactcatttagtgagccagcacagcaggccatgaggaaggctcttggcctgagatatgcacttctgccgcatctgtacacccttttccaccaggctcatgtccatggagagactgttgcacgacctctgttcttggagttcccaaaagactcttccacgtggacagtcgatcaccagatgctgtggggcgaggctctgctgattacacctgtattgcaacctggtaaggccgaagttaccgggtactttccattggggacctggtatgatctgcaaacagtcccggttgaagctcttggaagtcttccacctccacctgctgcaccaagggagcctgcgatccactctgaaggacagtgggtaactttgcctgcaccgctggacaccatcaatgtccatctgcgcgaaggctacatcataccacttcaaggtcctggactgaccactacagagtctagatttcaaccaatggctcttgctgttgcactgactaaaagcggcgaagcaaggggtgagctgttctgggacgacggagagtcactggaggtactcgaacgaggcgcgtatacgcaggtcatttttgaggctcgcaataatacgatcgttaacgagctggtccacgtcacttcagaaggtgcaggccttcagttgggcaaggtaactgtcctgggagttgctacagcaccgcagcaggtcttgtccaacggacggcccgtaagcaactttacctatagtcctgataccaaagttctggacatctgcgttgctctgctgatgggtgagcagttcctggtatcatggtgc

SEQ ID NO: 452 - protein, 944 aa, synthetic construct
  REGION 1..944: note = Variant of the Homo Sapiens Lysosomal alpha-glucosidase
MEWSWVFLFFLSVTTGVHSGHILWHDFSTVPRELSGSSQVLEETHPAHQVGASRPGPRDAQLHPGRPRAVPTQCDVPENSRFDCAPEKAITQEQCEARGCCYIPAKQGLQGAQMGQPWCFFPPSYPSYKLENLSQSEMGYTATLTRTTPSFFPKDILTLRLDVMMETENRLHFTIKDPANRRYEVPLETPHVHSRAPSPLYSVEFSEEPFGVIVRRQLDGRVLLNTTVAPLFFADQFLQLSTSLPSQYITGLAEHLSPLMLSTSWNKITLWNRDLAPTPGANLYGSHPFYLALEDGGSAHGVFLLNSNAMDVVLQPSPALSWRSTGGILDVYIFLGPEPKSVVQQYLDVVGYPFMPPYWGLGFHLCRWGYSSTAITRQVVENMTRAHFPLDVQWNDLDYMDSRRDFTFNKDGFRDFPAMVQELHQGGRRYMMIVDPGISSSGPAGSYRPYDEGLRRGVFITNETGQPLIGKVWPGSTAFPDFTNPEALAWWEDMVAEFHDQVPFDGMWIDMNEPSNFIRGSVDGCPNNELENPPYVPGVVGGTLQAATICASSHQFLSTHYNLHNLYGTTEAIASHRALVKARGTRPFVISRSTFAGHGRYAGHWTGDVWSSWEQLASSVPEILQFNLLGVPLVGADVCGFLGNTSEELCVRWTQLGAFYPFMRNHNSLTSLPQEPYSFSEPAQQAMRKALGLRYALLPHLYTLFHQAHVHGETVARPLFLEFPKDSSTWTVDHQMLWGEALLITPVLQPGKAEVTGYFPLGTWYDLQTVPVEALGSLPPPPAAPREPAIHSEGQWVTLPAPLDTINVHLREGYIIPLQGPGLTTTESRFQPMALAVALTKSGEARGELFWDDGESLEVLERGAYTQVIFEARNNTIVNELVHVTSEGAGLQLGKVTVLGVATAPQQVLSNGRPVSNFTYSPDTKVLDICVALLMGEQFLVSWC

SEQ ID NO: 453 - DNA, 2832 bp, synthetic construct
  misc_feature 1..2832: note = Variant of the Homo Sapiens Lysosomal alpha-glucosidase
  source 1..2832: mol_type = other DNA
atggaatggagctgggtctttctcttcttcctgtcagtaacgactggtgtccactccggacacattctgtggcatgatttttctaccgtgcctagagagctttccggttcaagtcaagtcctcgaagaaacacatccagcccatcaggttggcgcatctaggccgggccctcgggacgctcaactccacccagggagacctagggccgttcccactcagtgcgacgtgccagagaactcacgcttcgattgtgcacctgagaaggctatcacgcaagagcagtgcgaggcccgcggatgttgttacataccggctaaacaggggctgcagggtgcgcagatgggccaaccttggtgcttcttcccaccatcctatccgagttacaagctggagaatctctcccagtctgaaatgggatataccgcaacactgactcggaccaccccctccttctttcccaaagatatcttgactctgagacttgacgtaatgatggagacagaaaacaggctccactttaccattaaggaccctgccaatcgccgatacgaggtgcctctggaaacaccacacgtgcacagtagagctccatcacctctgtattctgtcgagttctccgaagagccgtttggcgttatcgtcaggaggcagctcgacgggcgagtgcttctgaacacgactgtggccccgttgttctttgcggatcagtttctgcaactgtcaacaagtctcccttctcagtacattaccgggcttgcagagcatctgtccccactcatgctgagtacttcatggaacaaaatcacactgtggaatagagaccttgctcctactccaggagccaacttgtatggttctcaccctttctacttggccctggaagatggcggatcagcgcatggcgtattcctcctgaattccaacgcaatggacgttgttcttcagccatctcctgctttgagttggagatctacaggcgggatactggacgtctacatctttctgggtccagagcctaaatccgtagtgcagcagtatcttgatgtcgtcggatacccgtttatgccaccatattggggcctggggttccacttgtgccgctggggatattcatccaccgccattacacgacaagttgttgagaatatgaccagggcacattttcctctggatgtacagtggaacgacctggactacatggatagtcgccgcgacttcaccttcaataaggatgggttcagagactttcctgctatggtccaagaacttcaccagggaggcaggaggtacatgatgatcgtagatccgggaatttcttcttctggcccagccggttcatacagaccgtatgacgaaggactgcgacgaggcgtctttatcacgaacgagactggtcagcctttgataggcaaggtttggccagggtccaccgctttcccggatttcacaaatcctgaggcactggcctggtgggaagatatggtcgccgagtttcacgaccaggtcccatttgacgggatgtggatcgacatgaacgagccatccaacttcattagaggaagtcatgatggctgtccgaataatgagctggaaaaccctccttacgtaccaggcgttgttggtgggactcttcaagctgcgacgatttgcgcatcctcccatcagttcctgtcaacccactataacttgcacaatctgtacgggacaacagaggctatcgccagtcatagggccctggtaaaagctagaggaacacgccctttcgttatctctcgctcaacttttgcaggccacggtaggtatgccggacattggaccggcgacgtctggagttcttgggaacagctggcttcctccgttccagagatattgcagtttaacctgttgggagtcccacttgtaggtgcagatgtttgtggcttcctggggaacacctcagaagaattgtgcgtaagatggactcaactgggcgccttctacccttttatgcgcaatcacaactcactgacatctttgcctcaagaaccgtactcatttagtgagccagcacagcaggccatgaggaaggctcttggcctgagatatgcacttctgccgcatctgtacacccttttccaccaggctcatgtccatggagagactgttgcacgacctctgttcttggagttcccaaaagactcttccacgtggacagtcgatcaccagatgctgtggggcgaggctctgctgattacacctgtattgcaacctggtaaggccgaagttaccgggtactttccattggggacctggtatgatctgcaaacagtcccggttgaagctcttggaagtcttccacctccacctgctgcaccaagggagcctgcgatccactctgaaggacagtgggtaactttgcctgcaccgctggacaccatcaatgtccatctgcgcgaaggctacatcataccacttcaaggtcctggactgaccactacagagtctagaaaacaaccaatggctcttgctgttgcactgactaaaagcggcgaagcaaggggtgagctgttctgggacgacggagagtcactggaggtactcgaacgaggcgcgtatacgcaggtcatttttgaggctcgcaataatacgatcgttaacgagctggtccacgtcacttcagaaggtgcaggccttcagttgggcaaggtaactgtcctgggagttgctacagcaccgcagcaggtcttgtccaacggacggcccgtaagcaactttacctatagtcctgataccaaagttctggacatctgcgttgctctgctgatgggtgagcagttcctggtatcatggtgc

SEQ ID NO: 454 - protein, 944 aa, synthetic construct
  REGION 1..944: note = Variant of the Homo Sapiens Lysosomal alpha-glucosidase
MEWSWVFLFFLSVTTGVHSGHILWHDFSTVPRELSGSSQVLEETHPAHQVGASRPGPRDAQLHPGRPRAVPTQCDVPENSRFDCAPEKAITQEQCEARGCCYIPAKQGLQGAQMGQPWCFFPPSYPSYKLENLSQSEMGYTATLTRTTPSFFPKDILTLRLDVMMETENRLHFTIKDPANRRYEVPLETPHVHSRAPSPLYSVEFSEEPFGVIVRRQLDGRVLLNTTVAPLFFADQFLQLSTSLPSQYITGLAEHLSPLMLSTSWNKITLWNRDLAPTPGANLYGSHPFYLALEDGGSAHGVFLLNSNAMDVVLQPSPALSWRSTGGILDVYIFLGPEPKSVVQQYLDVVGYPFMPPYWGLGFHLCRWGYSSTAITRQVVENMTRAHFPLDVQWNDLDYMDSRRDFTFNKDGFRDFPAMVQELHQGGRRYMMIVDPGISSSGPAGSYRPYDEGLRRGVFITNETGQPLIGKVWPGSTAFPDFTNPEALAWWEDMVAEFHDQVPFDGMWIDMNEPSNFIRGSHDGCPNNELENPPYVPGVVGGTLQAATICASSHQFLSTHYNLHNLYGTTEAIASHRALVKARGTRPFVISRSTFAGHGRYAGHWTGDVWSSWEQLASSVPEILQFNLLGVPLVGADVCGFLGNTSEELCVRWTQLGAFYPFMRNHNSLTSLPQEPYSFSEPAQQAMRKALGLRYALLPHLYTLFHQAHVHGETVARPLFLEFPKDSSTWTVDHQMLWGEALLITPVLQPGKAEVTGYFPLGTWYDLQTVPVEALGSLPPPPAAPREPAIHSEGQWVTLPAPLDTINVHLREGYIIPLQGPGLTTTESRKQPMALAVALTKSGEARGELFWDDGESLEVLERGAYTQVIFEARNNTIVNELVHVTSEGAGLQLGKVTVLGVATAPQQVLSNGRPVSNFTYSPDTKVLDICVALLMGEQFLVSWC

SEQ ID NO: 455 - DNA, 2832 bp, synthetic construct
  misc_feature 1..2832: note = Variant of the Homo Sapiens Lysosomal alpha-glucosidase
  source 1..2832: mol_type = other DNA
atggaatggagctgggtctttctcttcttcctgtcagtaacgactggtgtccactccggacacattctgtggcatgattttgataccgtgcctagagagctttccggttcaagtcaagtcctcgaagaaacacatccagcccatcaggttggcgcatctaggccgggccctcgggacgctcaactccacccagggagacctagggccgttcccactcagtgcgacgtgccagagaactcacgcttcgattgtgcacctgagaaggctatcacgcaagagcagtgcgaggcccgcggatgttgttacataccggctaaacaggggctgcagggtgcgcagatgggccaaccttggtgcttcttcccaccatcctatccgagttacaagctggagaatctctcccagtctgaaatgggatataccgcaacactgactcggaccaccccctccttctttcccaaagatatcttgactctgagacttgacgtaatgatggagacagaaaacaggctccactttaccattaaggaccctgccaatcgccgatacgaggtgcctctggaaacaccacacgtgcacagtagagctccatcacctctgtattctgtcgagttctccgaagagccgtttggcgttatcgtcaggaggcagctcgacgggcgagtgcttctgaacacgactgtggccccgttgttctttgcggatcagtttctgcaactgtcaacaagtctcccttctcagtacattaccgggcttgcagagcatctgtccccactcatgctgagtacttcatggaacaaaatcacactgtggaatagagaccttgctcctactccaggagccaacttgtatggttctcaccctttctacttggccctggaagatggcggatcagcgcatggcgtattcctcctgaattccaacgcaatggacgttgttcttcagccatctcctgctttgagttggagatctacaggcgggatactggacgtctacatctttctgggtccagagcctaaatccgtagtgcagcagtatcttgatgtcgtcggatacccgtttatgccaccatattggggcctggggttccacttgtgccgctggggatattcatccaccgccattacacgacaagttgttgagaatatgaccagggcacattttcctctggatgtacagtggaacgacctggactacatggatagtcgccgcgacttcaccttcaataaggatgggttcagagactttcctgctatggtccaagaacttcaccagggaggcaggaggtacatgatgatcgtagatccgggaatttcttcttctggcccagccggttcatacagaccgtatgacgaaggactgcgacgaggcgtctttatcacgaacgagactggtcagcctttgataggcaaggtttggccagggtccaccgctttcccggatttcacaaatcctgaggcactggcctggtgggaagatatggtcgccgagtttcacgaccaggtcccatttgacgggatgtggatcgacatgaacgagccatccaacttcattagaggaagtgtggatggctgtccgaataatgagctggaaaaccctccttacgtaccaggcgttgttggtgggactcttcaagctgcgacgatttgcgcatcctcccatcagttcctgtcaacccactataacttgcacaatctgtacgggacaacagaggctatcgccagtcatagggccctggtaaaagctagaggaacacgccctttcgttatctctcgctcaacttttgcaggccacggtaggtatgccggacattggaccggcgacgtctggagttcttgggaacagctggcttcctccgttccagagatattgcagtttaacctgttgggagtcccacttgtaggtgcagatgtttgtggcttcctggggaacacctcagaagaattgtgcgtaagatggactcaactgggcgccttctacccttttatgcgcaatcacaactcactgacatctttgcctcaagaaccgtactcatttagtgagccagcacagcaggccatgaggaaggctcttggcctgagatatgcacttctgccgcatctgtacacccttttccaccaggctcatgtccatggagagactgttgcacgacctctgttcttggagttcccaaaagactcttccacgtggacagtcgatcaccagatgctgtggggcgaggctctgctgattacacctgtattgcaacctggtaaggccgaagttaccgggtactttccattggggacctggtatgatctgcaaacagtcccggttgaagctcttggaagtcttccacctccacctgctgcaccaagggagcctgcgatccactctgaaggacagtgggtaactttgcctgcaccgctggacaccatcaatgtccatctgcgcgaaggctacatcataccacttcaaggtcctggactgaccactacagagtctagaaaacaaccaatggctcttgctgttgcactgactaaaagcggcgaagcaaggggtgagctgttctgggacgacggagagtcactggaggtactcgaacgaggcgcgtatacgcaggtcatttttgaggctcgcaataatacgatcgttaacgagctggtccacgtcacttcagaaggtgcaggccttcagttgggcaaggtaactgtcctgggagttgctacagcaccgcagcaggtcttgtccaacggacggcccgtaagcaactttacctatagtcctgataccaaagttctggacatctgcgttgctctgctgatgggtgagcagttcctggtatcatggtgc

SEQ ID NO: 456 - protein, 944 aa, synthetic construct
  REGION 1..944: note = Variant of the Homo Sapiens Lysosomal alpha-glucosidase
MEWSWVFLFFLSVTTGVHSGHILWHDFDTVPRELSGSSQVLEETHPAHQVGASRPGPRDAQLHPGRPRAVPTQCDVPENSRFDCAPEKAITQEQCEARGCCYIPAKQGLQGAQMGQPWCFFPPSYPSYKLENLSQSEMGYTATLTRTTPSFFPKDILTLRLDVMMETENRLHFTIKDPANRRYEVPLETPHVHSRAPSPLYSVEFSEEPFGVIVRRQLDGRVLLNTTVAPLFFADQFLQLSTSLPSQYITGLAEHLSPLMLSTSWNKITLWNRDLAPTPGANLYGSHPFYLALEDGGSAHGVFLLNSNAMDVVLQPSPALSWRSTGGILDVYIFLGPEPKSVVQQYLDVVGYPFMPPYWGLGFHLCRWGYSSTAITRQVVENMTRAHFPLDVQWNDLDYMDSRRDFTFNKDGFRDFPAMVQELHQGGRRYMMIVDPGISSSGPAGSYRPYDEGLRRGVFITNETGQPLIGKVWPGSTAFPDFTNPEALAWWEDMVAEFHDQVPFDGMWIDMNEPSNFIRGSVDGCPNNELENPPYVPGVVGGTLQAATICASSHQFLSTHYNLHNLYGTTEAIASHRALVKARGTRPFVISRSTFAGHGRYAGHWTGDVWSSWEQLASSVPEILQFNLLGVPLVGADVCGFLGNTSEELCVRWTQLGAFYPFMRNHNSLTSLPQEPYSFSEPAQQAMRKALGLRYALLPHLYTLFHQAHVHGETVARPLFLEFPKDSSTWTVDHQMLWGEALLITPVLQPGKAEVTGYFPLGTWYDLQTVPVEALGSLPPPPAAPREPAIHSEGQWVTLPAPLDTINVHLREGYIIPLQGPGLTTTESRKQPMALAVALTKSGEARGELFWDDGESLEVLERGAYTQVIFEARNNTIVNELVHVTSEGAGLQLGKVTVLGVATAPQQVLSNGRPVSNFTYSPDTKVLDICVALLMGEQFLVSWC

SEQ ID NO: 457 - DNA, 2832 bp, synthetic construct
  misc_feature 1..2832: note = Variant of the Homo Sapiens Lysosomal alpha-glucosidase
  source 1..2832: mol_type = other DNA
atggaatggagctgggtctttctcttcttcctgtcagtaacgactggtgtccactccggacacattctgtggcatgatttttctaccgtgcctagagagctttccggttcaagtcaagtcctcgaagaaacacatccagcccatcaggttggcgcatctaggccgggccctcgggacgctcaactccacccagggagacctagggccgttcccactcagtgcgacgtgccagagaactcacgcttcgattgtgcacctgagaaggctatcacgcaagagcagtgcgaggcccgcggatgttgttacataccggctaaacaggggctgcagggtgcgcagatgggccaaccttggtgcttcttcccaccatcctatccgagttacaagctggagaatctctcccagtctgaaatgggatataccgcaacactgactcggaccaccccctccttctttcccaaagatatcttgactctgagacttgacgtaatgatggagacagaaaacaggctccactttaccattaaggaccctgccaatcgccgatacgaggtgcctctggaaacaccacacgtgcacagtagagctccatcacctctgtattctgtcgagttctccgaagagccgtttggcgttatcgtcaggaggcagctcgacgggcgagtgcttctgaacacgactgtggccccgttgttctttgcggatcagtttctgcaactgtcaacaagtctcccttctcagtacattaccgggcttgcagagcatctgtccccactcatgctgagtacttcatggaacaaaatcacactgtggaatagagaccttgctcctactccaggagccaacttgtatggttctcaccctttctacttggccctggaagatggcggatcagcgcatggcgtattcctcctgaattccaacgcaatggacgttgttcttcagccatctcctgctttgagttggagatctacaggcgggatactggacgtctacatctttctgggtccagagcctaaatccgtagtgcagcagtatcttgatgtcgtcggatacccgtttatgccaccatattggggcctggggttccacttgtgccgctggggatattcatccaccgccattacacgacaagttgttgagaatatgaccagggcacattttcctctggatgtacagtggaacgacctggactacatggatagtcgccgcgacttcaccttcaataaggatgggttcagagactttcctgctatggtccaagaacttcaccagggaggcaggaggtacatgatgatcgtagatccgggaatttcttcttctggcccagccggttcatacagaccgtatgacgaaggactgcgacgaggcgtctttatcacgaacgagactggtcagcctttgataggcaaggtttggccagggtccaccgctttcccggatttcacaaatcctgaggcactggcctggtgggaagatatggtcgccgagtttcacgaccaggtcccatttgacgggatgtggatcgacatgaacgagccatccaacttcattagaggaagtcaggatggctgtccgaataatgagctggaaaaccctccttacgtaccaggcgttgttggtgggactcttcaagctgcgacgatttgcgcatcctcccatcagttcctgtcaacccactataacttgcacaatctgtacgggacaacagaggctatcgccagtcatagggccctggtaaaagctagaggaacacgccctttcgttatctctcgctcaacttttgcaggccacggtaggtatgccggacattggaccggcgacgtctggagttcttgggaacagctggcttcctccgttccagagatattgcagtttaacctgttgggagtcccacttgtaggtgcagatgtttgtggcttcctggggaacacctcagaagaattgtgcgtaagatggactcaactgggcgccttctacccttttatgcgcaatcacaactcactgacatctttgcctcaagaaccgtactcatttagtgagccagcacagcaggccatgaggaaggctcttggcctgagatatgcacttctgccgcatctgtacacccttttccaccaggctcatgtccatggagagactgttgcacgacctctgttcttggagttcccaaaagactcttccacgtggacagtcgatcaccagatgctgtggggcgaggctctgctgattacacctgtattgcaacctggtaaggccgaagttaccgggtactttccattggggacctggtatgatctgcaaacagtcccggttgaagctcttggaagtcttccacctccacctgctgcaccaagggagcctgcgatccactctgaaggacagtgggtaactttgcctgcaccgctggacaccatcaatgtccatctgcgcgaaggctacatcataccacttcaaggtcctggactgaccactacagagtctagaaaacaaccaatggctcttgctgttgcactgactaaaagcggcgaagcaaggggtgagctgttctgggacgacggagagtcactggaggtactcgaacgaggcgcgtatacgcaggtcatttttgaggctcgcaataatacgatcgttaacgagctggtccacgtcacttcagaaggtgcaggccttcagttgggcaaggtaactgtcctgggagttgctacagcaccgcagcaggtcttgtccaacggacggcccgtaagcaactttacctatagtcctgataccaaagttctggacatctgcgttgctctgctgatgggtgagcagttcctggtatcatggtgc

SEQ ID NO: 458 - protein, 944 aa, synthetic construct
  REGION 1..944: note = Variant of the Homo Sapiens Lysosomal alpha-glucosidase
MEWSWVFLFFLSVTTGVHSGHILWHDFSTVPRELSGSSQVLEETHPAHQVGASRPGPRDAQLHPGRPRAVPTQCDVPENSRFDCAPEKAITQEQCEARGCCYIPAKQGLQGAQMGQPWCFFPPSYPSYKLENLSQSEMGYTATLTRTTPSFFPKDILTLRLDVMMETENRLHFTIKDPANRRYEVPLETPHVHSRAPSPLYSVEFSEEPFGVIVRRQLDGRVLLNTTVAPLFFADQFLQLSTSLPSQYITGLAEHLSPLMLSTSWNKITLWNRDLAPTPGANLYGSHPFYLALEDGGSAHGVFLLNSNAMDVVLQPSPALSWRSTGGILDVYIFLGPEPKSVVQQYLDVVGYPFMPPYWGLGFHLCRWGYSSTAITRQVVENMTRAHFPLDVQWNDLDYMDSRRDFTFNKDGFRDFPAMVQELHQGGRRYMMIVDPGISSSGPAGSYRPYDEGLRRGVFITNETGQPLIGKVWPGSTAFPDFTNPEALAWWEDMVAEFHDQVPFDGMWIDMNEPSNFIRGSQDGCPNNELENPPYVPGVVGGTLQAATICASSHQFLSTHYNLHNLYGTTEAIASHRALVKARGTRPFVISRSTFAGHGRYAGHWTGDVWSSWEQLASSVPEILQFNLLGVPLVGADVCGFLGNTSEELCVRWTQLGAFYPFMRNHNSLTSLPQEPYSFSEPAQQAMRKALGLRYALLPHLYTLFHQAHVHGETVARPLFLEFPKDSSTWTVDHQMLWGEALLITPVLQPGKAEVTGYFPLGTWYDLQTVPVEALGSLPPPPAAPREPAIHSEGQWVTLPAPLDTINVHLREGYIIPLQGPGLTTTESRKQPMALAVALTKSGEARGELFWDDGESLEVLERGAYTQVIFEARNNTIVNELVHVTSEGAGLQLGKVTVLGVATAPQQVLSNGRPVSNFTYSPDTKVLDICVALLMGEQFLVSWC

SEQ ID NO: 459 - DNA, 2832 bp, synthetic construct
  misc_feature 1..2832: note = Variant of the Homo Sapiens Lysosomal alpha-glucosidase
  source 1..2832: mol_type = other DNA
atggaatggagctgggtctttctcttcttcctgtcagtaacgactggtgtccactccggacacattctgtggcatgatttttctaccgtgcctagagagctttccggttcaagtcaagtcctcgaagaaacacatccagcccatcaggcgggcgcatctaggccgggccctcgggacgctcaactccacccagggagacctagggccgttcccactcagtgcgacgtgccagagaactcacgcttcgattgtgcacctgagaaggctatcacgcaagagcagtgcgaggcccgcggatgttgttacataccggctaaacaggggctgcagggtgcgcagatgggccaaccttggtgcttcttcccaccatcctatccgagttacaagctggagaatctctcccagtctgaaatgggatataccgcaacactgactcggaccaccccctccttctttcccaaagatatcttgactctgagacttgacgtaatgatggagacagaaaacaggctccactttaccattaaggaccctgccaatcgccgatacgaggtgcctctggaaacaccacacgtgcacagtagagctccatcacctctgtattctgtcgagttctccgaagagccgtttggcgttatcgtcaggaggcagctcgacgggcgagtgcttctgaacacgactgtggccccgttgttctttgcggatcagtttctgcaactgtcaacaagtctcccttctcagtacattaccgggcttgcagagcatctgtccccactcatgctgagtacttcatggaacaaaatcacactgtggaatagagaccttgctcctactccaggagccaacttgtatggttctcaccctttctacttggccctggaagatggcggatcagcgcatggcgtattcctcctgaattccaacgcaatggacgttgttcttcagccatctcctgctttgagttggagatctacaggcgggatactggacgtctacatctttctgggtccagagcctaaatccgtagtgcagcagtatcttgatgtcgtcggatacccgtttatgccaccatattggggcctggggttccacttgtgccgctggggatattcatccaccgccattacacgacaagttgttgagaatatgaccagggcacattttcctctggatgtacagtggaacgacctggactacatggatagtcgccgcgacttcaccttcaataaggatgggttcagagactttcctgctatggtccaagaacttcaccagggaggcaggaggtacatgatgatcgtagatccgggaatttcttcttctggcccagccggttcatacagaccgtatgacgaaggactgcgacgaggcgtctttatcacgaacgagactggtcagcctttgataggcaaggtttggccagggtccaccgctttcccggatttcacaaatcctgaggcactggcctggtgggaagatatggtcgccgagtttcacgaccaggtcccatttgacgggatgtggatcgacatgaacgagccatccaacttcattagaggaagtgtggatggctgtccgaataatgagctggaaaaccctccttacgtaccaggcgttgttggtgggactcttcaagctgcgacgatttgcgcatcctcccatcagttcctgtcaacccactataacttgcacaatctgtacgggacaacagaggctatcgccagtcatagggccctggtaaaagctagaggaacacgccctttcgttatctctcgctcaacttttgcaggccacggtaggtatgccggacattggaccggcgacgtctggagttcttgggaacagctggcttcctccgttccagagatattgcagtttaacctgttgggagtcccacttgtaggtgcagatgtttgtggcttcctggggaacacctcagaagaattgtgcgtaagatggactcaactgggcgccttctacccttttatgcgcaatcacaactcactgacatctttgcctcaagaaccgtactcatttagtgagccagcacagcaggccatgaggaaggctcttggcctgagatatgcacttctgccgcatctgtacacccttttccaccaggctcatgtccatggagagactgttgcacgacctctgttcttggagttcccaaaagactcttccacgtggacagtcgatcaccagatgctgtggggcgaggctctgctgattacacctgtattgcaacctggtaaggccgaagttaccgggtactttccattggggacctggtatgatctgcaaacagtcccggttgaagctcttggaagtcttccacctccacctgctgcaccaagggagcctgcgatccactctgaaggacagtgggtaactttgcctgcaccgctggacaccatcaatgtccatctgcgcgaaggctacatcataccacttcaaggtcctggactgaccactacagagtctagaaaacaaccaatggctcttgctgttgcactgactaaaagcggcgaagcaaggggtgagctgttctgggacgacggagagtcactggaggtactcgaacgaggcgcgtatacgcaggtcatttttgaggctcgcaataatacgatcgttaacgagctggtccacgtcacttcagaaggtgcaggccttcagttgggcaaggtaactgtcctgggagttgctacagcaccgcagcaggtcttgtccaacggacggcccgtaagcaactttacctatagtcctgataccaaagttctggacatctgcgttgctctgctgatgggtgagcagttcctggtatcatggtgc

SEQ ID NO: 460 - protein, 944 aa, synthetic construct
  REGION 1..944: note = Variant of the Homo Sapiens Lysosomal alpha-glucosidase
MEWSWVFLFFLSVTTGVHSGHILWHDFSTVPRELSGSSQVLEETHPAHQAGASRPGPRDAQLHPGRPRAVPTQCDVPENSRFDCAPEKAITQEQCEARGCCYIPAKQGLQGAQMGQPWCFFPPSYPSYKLENLSQSEMGYTATLTRTTPSFFPKDILTLRLDVMMETENRLHFTIKDPANRRYEVPLETPHVHSRAPSPLYSVEFSEEPFGVIVRRQLDGRVLLNTTVAPLFFADQFLQLSTSLPSQYITGLAEHLSPLMLSTSWNKITLWNRDLAPTPGANLYGSHPFYLALEDGGSAHGVFLLNSNAMDVVLQPSPALSWRSTGGILDVYIFLGPEPKSVVQQYLDVVGYPFMPPYWGLGFHLCRWGYSSTAITRQVVENMTRAHFPLDVQWNDLDYMDSRRDFTFNKDGFRDFPAMVQELHQGGRRYMMIVDPGISSSGPAGSYRPYDEGLRRGVFITNETGQPLIGKVWPGSTAFPDFTNPEALAWWEDMVAEFHDQVPFDGMWIDMNEPSNFIRGSVDGCPNNELENPPYVPGVVGGTLQAATICASSHQFLSTHYNLHNLYGTTEAIASHRALVKARGTRPFVISRSTFAGHGRYAGHWTGDVWSSWEQLASSVPEILQFNLLGVPLVGADVCGFLGNTSEELCVRWTQLGAFYPFMRNHNSLTSLPQEPYSFSEPAQQAMRKALGLRYALLPHLYTLFHQAHVHGETVARPLFLEFPKDSSTWTVDHQMLWGEALLITPVLQPGKAEVTGYFPLGTWYDLQTVPVEALGSLPPPPAAPREPAIHSEGQWVTLPAPLDTINVHLREGYIIPLQGPGLTTTESRKQPMALAVALTKSGEARGELFWDDGESLEVLERGAYTQVIFEARNNTIVNELVHVTSEGAGLQLGKVTVLGVATAPQQVLSNGRPVSNFTYSPDTKVLDICVALLMGEQFLVSWC

SEQ ID NO: 461 - DNA, 2832 bp, synthetic construct
  misc_feature 1..2832: note = Variant of the Homo Sapiens Lysosomal alpha-glucosidase
  source 1..2832: mol_type = other DNA
atggaatggagctgggtctttctcttcttcctgtcagtaacgactggtgtccactccggacacattctgtggcatgatttttctaccgtgcctagagagctttccggttcaagtcaagtcctcgaagaaacacatccagcccatcaggttggcgcatctaggccgggccctcgggacgctcaactccacccagggagacctagggccgttcccactcagtgcgacgtgccagagaactcacgcttcgattgtgcacctgagaaggctatcacgcaagagcagtgcgaggcccgcggatgttgttacataccggctaaacaggggctgcagggtgcgcagatgggccaaccttggtgcttcttcccaccatcctatccgagttacaagctggagaatctctcccagtctgaaatgggatataccgcaacactgactcggaccaccccctccttctttcccaaagatatcttgactctgagacttgacgtaatgatggagacagaaaacaggctccactttaccattaaggaccctgccaatcgccgatacgaggtgcctctggaaacaccacacgtgcacagtagagctccatcacctctgtattctgtcgagttctccgaagagccgtttggcgttatcgtcaggaggcagctcgacgggcgagtgcttctgaacacgactgtggccccgttgttctttgcggatcagtttctgcaactgtcaacaagtctcccttctcagtacattaccgggcttgcagagcatctgtccccactcatgctgagtacttcatggaacaaaatcacactgtggaatagagaccttgctcctactccaggagccaacttgtatggttctcaccctttctacttggccctggaagatggcggatcagcgcatggcgtattcctcctgaattccaacgcaatggacgttgttcttcagccatctcctgctttgagttggagatctacaggcgggatactggacgtctacatctttctgggtccagagcctaaatccgtagtgcagcagtatcttgatgtcgtcggatacccgtttatgccaccatattggggcctggggttccacttgtgccgctggggatattcatccaccgccattacacgacaagttgttgagaatatgaccagggcacattttcctctggatgtacagtggaacgacctggactacatggatagtcgccgcgacttcaccttcaataaggatgggttcagagactttcctgctatggtccaagaacttcaccagggaggcaggaggtacatgatgatcgtagatccgggaatttcttcttctggcccagccggttcatacagaccgtatgacgaaggactgcgacgaggcgtctttatcacgaacgagactggtcagcctttgataggcaaggtttggccagggtccaccgctttcccggatttcacaaatcctgaggcactggcctggtgggaagatatggtcgccgagtttcacgaccaggtcccatttgacgggatgtggatcgacatgaacgagccatccaacttcattagaggaagtgtggatggctgtccgaataatgagctggaaaaccctccttacgtaccaggcgttgttggtgggactcttcaagctgcgacgatttgcgcatcctcccatcagttcctgtcaacccactataacttgcacaatctgtacgggacaacagaggctatcgccagtcatagggccctggtaaaagctagaggaacacgccctttcgttatctctcgctcaacttttgcaggccacggtaggtatgccggacattggaccggcgacgtctggagttcttgggaacagctggcttcctccgttccagagatattgcagtttaacctgttgggagtcccacttgtaggtgcagatgtttgtggcttcctggggaacacctcagaagaattgtgcgtaagatggactcaactgggcgccttctacccttttatgcgcaatcacaactcactgtcttctttgcctcaagaaccgtactcatttagtgagccagcacagcaggccatgaggaaggctcttggcctgagatatgcacttctgccgcatctgtacacccttttccaccaggctcatgtccatggagagactgttgcacgacctctgttcttggagttcccaaaagactcttccacgtggacagtcgatcaccagatgctgtggggcgaggctctgctgattacacctgtattgcaacctggtaaggccgaagttaccgggtactttccattggggacctggtatgatctgcaaacagtcccggttgaagctcttggaagtcttccacctccacctgctgcaccaagggagcctgcgatccactctgaaggacagtgggtaactttgcctgcaccgctggacaccatcaatgtccatctgcgcgaaggctacatcataccacttcaaggtcctggactgaccactacagagtctagaaaacaaccaatggctcttgctgttgcactgactaaaagcggcgaagcaaggggtgagctgttctgggacgacggagagtcactggaggtactcgaacgaggcgcgtatacgcaggtcatttttgaggctcgcaataatacgatcgttaacgagctggtccacgtcacttcagaaggtgcaggccttcagttgggcaaggtaactgtcctgggagttgctacagcaccgcagcaggtcttgtccaacggacggcccgtaagcaactttacctatagtcctgataccaaagttctggacatctgcgttgctctgctgatgggtgagcagttcctggtatcatggtgc

SEQ ID NO: 462 - protein, 944 aa, synthetic construct
  REGION 1..944: note = Variant of the Homo Sapiens Lysosomal alpha-glucosidase
MEWSWVFLFFLSVTTGVHSGHILWHDFSTVPRELSGSSQVLEETHPAHQVGASRPGPRDAQLHPGRPRAVPTQCDVPENSRFDCAPEKAITQEQCEARGCCYIPAKQGLQGAQMGQPWCFFPPSYPSYKLENLSQSEMGYTATLTRTTPSFFPKDILTLRLDVMMETENRLHFTIKDPANRRYEVPLETPHVHSRAPSPLYSVEFSEEPFGVIVRRQLDGRVLLNTTVAPLFFADQFLQLSTSLPSQYITGLAEHLSPLMLSTSWNKITLWNRDLAPTPGANLYGSHPFYLALEDGGSAHGVFLLNSNAMDVVLQPSPALSWRSTGGILDVYIFLGPEPKSVVQQYLDVVGYPFMPPYWGLGFHLCRWGYSSTAITRQVVENMTRAHFPLDVQWNDLDYMDSRRDFTFNKDGFRDFPAMVQELHQGGRRYMMIVDPGISSSGPAGSYRPYDEGLRRGVFITNETGQPLIGKVWPGSTAFPDFTNPEALAWWEDMVAEFHDQVPFDGMWIDMNEPSNFIRGSVDGCPNNELENPPYVPGVVGGTLQAATICASSHQFLSTHYNLHNLYGTTEAIASHRALVKARGTRPFVISRSTFAGHGRYAGHWTGDVWSSWEQLASSVPEILQFNLLGVPLVGADVCGFLGNTSEELCVRWTQLGAFYPFMRNHNSLSSLPQEPYSFSEPAQQAMRKALGLRYALLPHLYTLFHQAHVHGETVARPLFLEFPKDSSTWTVDHQMLWGEALLITPVLQPGKAEVTGYFPLGTWYDLQTVPVEALGSLPPPPAAPREPAIHSEGQWVTLPAPLDTINVHLREGYIIPLQGPGLTTTESRKQPMALAVALTKSGEARGELFWDDGESLEVLERGAYTQVIFEARNNTIVNELVHVTSEGAGLQLGKVTVLGVATAPQQVLSNGRPVSNFTYSPDTKVLDICVALLMGEQFLVSWC

SEQ ID NO: 463 - DNA, 2832 bp, synthetic construct
  misc_feature 1..2832: note = Variant of the Homo Sapiens Lysosomal alpha-glucosidase
  source 1..2832: mol_type = other DNA
atggaatggagctgggtctttctcttcttcctgtcagtaacgactggtgtccactccggacacattctgtggcatgatttttctaccgtgcctagagagctttccggttcaagtcaagtcctcgaagaaacacatccagcccatcaggttggcgcatctaggccgggccctcgggacgctcaactccacccagggagacctagggccgttcccactcagtgcgacgtgccagagaactcacgcttcgattgtgcacctgagaaggctatcacgcaagagcagtgcgaggcccgcggatgttgttacataccggctaaacaggggctgcagggtgcgcagatgggccaaccttggtgcttcttcccaccatcctatccgagttacaagctggagaatctctcccagtctgaaatgggatataccgcaacactgactcggaccaccccctccttctttcccaaagatatcttgactctgagacttgacgtaatgatggagacagaaaacaggctccactttaccattaaggaccctgccaatcgccgatacgaggtgcctctggaaacaccacacgtgcacagtagagctccatcacctctgtattctgtcgagttctccgaagagccgtttggcgttatcgtcaggaggcagctcgacgggcgagtgcttctgaacacgactgtggccccgttgttctttgcggatcagtttctgcaactgtcaacaagtctcccttctcagtacattaccgggcttgcagagcatctgtccccactcatgctgagtacttcatggaacaaaatcacactgtggaatagagaccttgctcctactccaggagccaacttgtatggttctcaccctttctacttggccctggaagatggcggatcagcgcatggcgtattcctcctgaattccaacgcaatggacgttgttcttcagccatctcctgctttgagttggagatctacaggcgggatactggacgtctacatctttctgggtccagagcctaaatccgtagtgcagcagtatcttgatgtcgtcggatacccgtttatgccaccatattggggcctggggttccacttgtgccgctggggatattcatccaccgccattacacgacaagttgttgagaatatgaccagggcacattttcctctggatgtacagtggaacgacctggactacatggatagtcgccgcgacttcaccttcaataaggatgggttcagagactttcctgctatggtccaagaacttcaccagggaggcaggaggtacatgatgatcgtagatccgggaatttcttcttctggcccagccggttcatacagaccgtatgacgaaggactgcgacgaggcgtctttatcacgaacgagactggtcagcctttgataggcaaggtttggccagggtccaccgctttcccggatttcacaaatcctgaggcactggcctggtgggaagatatggtcgccgagtttcacgaccaggtcccatttgacgggatgtggatcgacatgaacgagccatccaacttcattagaggaagtgtggatggctgtccgaataatgagctggaaaaccctccttacgtaccaggcgttgttggtgggactcttcaagctgcgacgatttgcgcatcctcccatcagttcctgtcaacccactataacttgcacaatctgtacgggacaacagaggctatcgccagtcatagggccctggtaaaagctagaggaacacgccctttcgttatctctcgctcaacttttgcaggccacggtaggtatgccggacattggaccggcgacgtctggagttcttgggaacagctggcttcctccgttccagagatattgcagtttaacctgttgggagtcccacttgtaggtgcagatgtttgtggcttcctggggaacacctcagaagaattgtgcgtaagatggactcaactgggcgccttctacccttttatgcgcaatcacaactcactgacatctttgcctcaagaaccgtactcatttagtgagccagcacagcaggccatgaggaaggctcttggcctgagatatgcacttctgccgcatctgtacacccttttccaccaggctcatgtccatggagagactgttgcacgacctctgttcttggagttcccaaaagactcttccacgtggacagtcgatcaccagatgctgtggggcgaggctctgctgattacacctgtattgcaacctggtaaggccgaagttaccgggtactttccattggggacctggtatgatctgcaaacagtcccggttgaagctcttggaagtcttccacctccacctgctgcaccaagggagcctgcgatccactctgaaggacagtgggtaactttgcctgcaccgctggacaccatcaatgtccatctgcgcgaaggctacatcataccacttcaaggtcctggactgaccactacagagtctagaatgcaaccaatggctcttgctgttgcactgactaaaagcggcgaagcaaggggtgagctgttctgggacgacggagagtcactggaggtactcgaacgaggcgcgtatacgcaggtcatttttgaggctcgcaataatacgatcgttaacgagctggtccacgtcacttcagaaggtgcaggccttcagttgggcaaggtaactgtcctgggagttgctacagcaccgcagcaggtcttgtccaacggacggcccgtaagcaactttacctatagtcctgataccaaagttctggacatctgcgttgctctgctgatgggtgagcagttcctggtatcatggtgc

SEQ ID NO: 464 - protein, 944 aa, synthetic construct
  REGION 1..944: note = Variant of the Homo Sapiens Lysosomal alpha-glucosidase
MEWSWVFLFFLSVTTGVHSGHILWHDFSTVPRELSGSSQVLEETHPAHQVGASRPGPRDAQLHPGRPRAVPTQCDVPENSRFDCAPEKAITQEQCEARGCCYIPAKQGLQGAQMGQPWCFFPPSYPSYKLENLSQSEMGYTATLTRTTPSFFPKDILTLRLDVMMETENRLHFTIKDPANRRYEVPLETPHVHSRAPSPLYSVEFSEEPFGVIVRRQLDGRVLLNTTVAPLFFADQFLQLSTSLPSQYITGLAEHLSPLMLSTSWNKITLWNRDLAPTPGANLYGSHPFYLALEDGGSAHGVFLLNSNAMDVVLQPSPALSWRSTGGILDVYIFLGPEPKSVVQQYLDVVGYPFMPPYWGLGFHLCRWGYSSTAITRQVVENMTRAHFPLDVQWNDLDYMDSRRDFTFNKDGFRDFPAMVQELHQGGRRYMMIVDPGISSSGPAGSYRPYDEGLRRGVFITNETGQPLIGKVWPGSTAFPDFTNPEALAWWEDMVAEFHDQVPFDGMWIDMNEPSNFIRGSVDGCPNNELENPPYVPGVVGGTLQAATICASSHQFLSTHYNLHNLYGTTEAIASHRALVKARGTRPFVISRSTFAGHGRYAGHWTGDVWSSWEQLASSVPEILQFNLLGVPLVGADVCGFLGNTSEELCVRWTQLGAFYPFMRNHNSLTSLPQEPYSFSEPAQQAMRKALGLRYALLPHLYTLFHQAHVHGETVARPLFLEFPKDSSTWTVDHQMLWGEALLITPVLQPGKAEVTGYFPLGTWYDLQTVPVEALGSLPPPPAAPREPAIHSEGQWVTLPAPLDTINVHLREGYIIPLQGPGLTTTESRMQPMALAVALTKSGEARGELFWDDGESLEVLERGAYTQVIFEARNNTIVNELVHVTSEGAGLQLGKVTVLGVATAPQQVLSNGRPVSNFTYSPDTKVLDICVALLMGEQFLVSWC

SEQ ID NO: 465 - DNA, 2832 bp, synthetic construct
  misc_feature 1..2832: note = Variant of the Homo Sapiens Lysosomal alpha-glucosidase
  source 1..2832: mol_type = other DNA
atggaatggagctgggtctttctcttcttcctgtcagtaacgactggtgtccactccggacacattctgtggcatgatttttctaccgtgcctagagagctttccggttcaagtcaagtcctcgaagaaacacatccagcccatcaggttggcgcatctaggccgggccctcgggacgctcaactccacccagggagacctagggccgttcccactcagtgcgacgtgccagagaactcacgcttcgattgtgcacctgagaaggctatcacgcaagagcagtgcgaggcccgcggatgttgttacataccggctaaacaggggctgcagggtgcgcagatgggccaaccttggtgcttcttcccaccatcctatccgagttacaagctggagaatctctcccagtctgaaatgggatataccgcaacactgactcggaccaccccctccttctttcccaaagatatcttgactctgagacttgacgtaatgatggagacagaaaacaggctccactttaccattaaggaccctgccaatcgccgatacgaggtgcctctggaaacaccacacgtgcacagtagagctccatcacctctgtattctgtcgagttctccgaagagccgtttggcgttatcgtcaggaggcagctcgacgggcgagtgcttctgaacacgactgtggccccgttgttctttgcggatcagtttctgcaactgtcaacaagtctcccttctcagtacattaccgggcttgcagagcatctgtccccactcatgctgagtacttcatggaacaaaatcacactgtggaatagagaccttgctcctactccaggagccaacttgtatggttctcaccctttctacttggccctggaagatggcggatcagcgcatggcgtattcctcctgaattccaacgcaatggacgttgttcttcagccatctcctgctttgagttggagatctacaggcgggatactggacgtctacatctttctgggtccagagcctaaatccgtagtgcagcagtatcttgatgtcgtcggatacccgtttatgccaccatattggggcctggggttccacttgtgccgctggggatattcatccaccgccattacacgacaagttgttgagaatatgaccagggcacattttcctctggatgtacagtggaacgacctggactacatggatagtcgccgcgacttcaccttcaataaggatgggttcagagactttcctgctatggtccaagaacttcaccagggaggcaggaggtacatgatgatcgtagatccgggaatttcttcttctggcccagccggttcatacagaccgtatgacgaaggactgcgacgaggcgtctttatcacgaacgagactggtcagcctttgataggcaaggtttggccagggtccaccgctttcccggatttcacaaatcctgaggcactggcctggtgggaagatatggtcgccgagtttcacgaccaggtcccatttgacgggatgtggatcgacatgaacgagccatccaacttcattagaggaagtgtggatggctgtccgaataatgagctggaaaaccctccttacgtaccaggcgttgttggtgggactcttcaagctgcgacgatttgcgcatcctcccatcagttcctgtcaacccactataacttgcacaatctgtacgggacaacagaggctatcgccagtcatagggccctggtaaaagctagaggaacacgccctttcgttatctctcgctcaacttttgcaggccacggtaggtatgccggacattggaccggcgacgtctggagttcttgggaacagctggcttcctccgttccagagatattgcagtttaacctgttgggagtcccacttgtaggtgcagatgtttgtggcttcctggggaacacctcagaagaattgtgcgtaagatggactcaactgggcgccttctacccttttatgcgcaatcacaactcactgacatctttgcctcaagaaccgtactcatttagtgagccagcacagcaggccatgaggaaggctcttggcctgagatatgcacttctgccgcatctgtacacccttttccaccaggctcatgtccatggagagactgttgcacgacctctgttcttggagttcccaaaagactcttccacgtggacagtcgatcaccagatgctgtggggcgaggctctgctgattacacctgtattgcaacctggtaaggccgaagttaccgggtactttccattggggacctggtatgatctgcaaacagtcccggttgaagctcttggaagtcttccacctccacctgctgcaccaagggagcctgcgatccactctgaaggacagtgggtaactttgcctgcaccgctggacaccatcaatgtccatctgcgcgaaggctacatcataccacttcaaggtcctggactgaccactacagagtctagaaaacaaccaatggctcttgctgttgcactgactaaagctggcgaagcaaggggtgagctgttctgggacgacggagagtcactggaggtactcgaacgaggcgcgtatacgcaggtcatttttgaggctcgcaataatacgatcgttaacgagctggtccacgtcacttcagaaggtgcaggccttcagttgggcaaggtaactgtcctgggagttgctacagcaccgcagcaggtcttgtccaacggacggcccgtaagcaactttacctatagtcctgataccaaagttctggacatctgcgttgctctgctgatgggtgagcagttcctggtatcatggtgc

SEQ ID NO: 466 - protein, 944 aa, synthetic construct
  REGION 1..944: note = Variant of the Homo Sapiens Lysosomal alpha-glucosidase
MEWSWVFLFFLSVTTGVHSGHILWHDFSTVPRELSGSSQVLEETHPAHQVGASRPGPRDAQLHPGRPRAVPTQCDVPENSRFDCAPEKAITQEQCEARGCCYIPAKQGLQGAQMGQPWCFFPPSYPSYKLENLSQSEMGYTATLTRTTPSFFPKDILTLRLDVMMETENRLHFTIKDPANRRYEVPLETPHVHSRAPSPLYSVEFSEEPFGVIVRRQLDGRVLLNTTVAPLFFADQFLQLSTSLPSQYITGLAEHLSPLMLSTSWNKITLWNRDLAPTPGANLYGSHPFYLALEDGGSAHGVFLLNSNAMDVVLQPSPALSWRSTGGILDVYIFLGPEPKSVVQQYLDVVGYPFMPPYWGLGFHLCRWGYSSTAITRQVVENMTRAHFPLDVQWNDLDYMDSRRDFTFNKDGFRDFPAMVQELHQGGRRYMMIVDPGISSSGPAGSYRPYDEGLRRGVFITNETGQPLIGKVWPGSTAFPDFTNPEALAWWEDMVAEFHDQVPFDGMWIDMNEPSNFIRGSVDGCPNNELENPPYVPGVVGGTLQAATICASSHQFLSTHYNLHNLYGTTEAIASHRALVKARGTRPFVISRSTFAGHGRYAGHWTGDVWSSWEQLASSVPEILQFNLLGVPLVGADVCGFLGNTSEELCVRWTQLGAFYPFMRNHNSLTSLPQEPYSFSEPAQQAMRKALGLRYALLPHLYTLFHQAHVHGETVARPLFLEFPKDSSTWTVDHQMLWGEALLITPVLQPGKAEVTGYFPLGTWYDLQTVPVEALGSLPPPPAAPREPAIHSEGQWVTLPAPLDTINVHLREGYIIPLQGPGLTTTESRKQPMALAVALTKAGEARGELFWDDGESLEVLERGAYTQVIFEARNNTIVNELVHVTSEGAGLQLGKVTVLGVATAPQQVLSNGRPVSNFTYSPDTKVLDICVALLMGEQFLVSWC

SEQ ID NO: 467 - DNA, 2832 bp, synthetic construct
  misc_feature 1..2832: note = Variant of the Homo Sapiens Lysosomal alpha-glucosidase
  source 1..2832: mol_type = other DNA
atggaatggagctgggtctttctcttcttcctgtcagtaacgactggtgtccactccggacacattctgtggcatgatttttctaccgtgcctagagagctttccggttcaagtcaagtcctcgaagaaacacatccagcccatcaggttggcgcatctaggccgggccctcgggacgctcaactccacccagggagacctagggccgttcccactcagtgcgacgtgccagagaactcacgcttcgattgtgcacctacgaaggctatcacgcaagagcagtgcgaggcccgcggatgttgttacataccggctaaacaggggctgcagggtgcgcagatgggccaaccttggtgcttcttcccaccatcctatccgagttacaagctggagaatctctcccagtctgaaatgggatataccgcaacactgactcggaccaccccctccttctttcccaaagatatcttgactctgagacttgacgtaatgatggagacagaaaacaggctccactttaccattaaggaccctgccaatcgccgatacgaggtgcctctggaaacaccacacgtgcacagtagagctccatcacctctgtattctgtcgagttctccgaagagccgtttggcgttatcgtcaggaggcagctcgacgggcgagtgcttctgaacacgactgtggccccgttgttctttgcggatcagtttctgcaactgtcaacaagtctcccttctcagtacattaccgggcttgcagagcatctgtccccactcatgctgagtacttcatggaacaaaatcacactgtggaatagagaccttgctcctactccaggagccaacttgtatggttctcaccctttctacttggccctggaagatggcggatcagcgcatggcgtattcctcctgaattccaacgcaatggacgttgttcttcagccatctcctgctttgagttggagatctacaggcgggatactggacgtctacatctttctgggtccagagcctaaatccgtagtgcagcagtatcttgatgtcgtcggatacccgtttatgccaccatattggggcctggggttccacttgtgccgctggggatattcatccaccgccattacacgacaagttgttgagaatatgaccagggcacattttcctctggatgtacagtggaacgacctggactacatggatagtcgccgcgacttcaccttcaataaggatgggttcagagactttcctgctatggtccaagaacttcaccagggaggcaggaggtacatgatgatcgtagatccgggaatttcttcttctggcccagccggttcatacagaccgtatgacgaaggactgcgacgaggcgtctttatcacgaacgagactggtcagcctttgataggcaaggtttggccagggtccaccgctttcccggatttcacaaatcctgaggcactggcctggtgggaagatatggtcgccgagtttcacgaccaggtcccatttgacgggatgtggatcgacatgaacgagccatccaacttcattagaggaagtgtggatggctgtccgaataatgagctggaaaaccctccttacgtaccaggcgttgttggtgggactcttcaagctgcgacgatttgcgcatcctcccatcagttcctgtcaacccactataacttgcacaatctgtacgggacaacagaggctatcgccagtcatagggccctggtaaaagctagaggaacacgccctttcgttatctctcgctcaacttttgcaggccacggtaggtatgccggacattggaccggcgacgtctggagttcttgggaacagctggcttcctccgttccagagatattgcagtttaacctgttgggagtcccacttgtaggtgcagatgtttgtggcttcctggggaacacctcagaagaattgtgcgtaagatggactcaactgggcgccttctacccttttatgcgcaatcacaactcactgacatctttgcctcaagaaccgtactcatttagtgagccagcacagcaggccatgaggaaggctcttggcctgagatatgcacttctgccgcatctgtacacccttttccaccaggctcatgtccatggagagactgttgcacgacctctgttcttggagttcccaaaagactcttccacgtggacagtcgatcaccagatgctgtggggcgaggctctgctgattacacctgtattgcaacctggtaaggccgaagttaccgggtactttccattggggacctggtatgatctgcaaacagtcccggttgaagctcttggaagtcttccacctccacctgctgcaccaagggagcctgcgatccactctgaaggacagtgggtaactttgcctgcaccgctggacaccatcaatgtccatctgcgcgaaggctacatcataccacttcaaggtcctggactgaccactacagagtctagaaaacaaccaatggctcttgctgttgcactgactaaaagcggcgaagcaaggggtgagctgttctgggacgacggagagtcactggaggtactcgaacgaggcgcgtatacgcaggtcatttttgaggctcgcaataatacgatcgttaacgagctggtccacgtcacttcagaaggtgcaggccttcagttgggcaaggtaactgtcctgggagttgctacagcaccgcagcaggtcttgtccaacggacggcccgtaagcaactttacctatagtcctgataccaaagttctggacatctgcgttgctctgctgatgggtgagcagttcctggtatcatggtgc

SEQ ID NO: 468 - protein, 944 aa, synthetic construct
  REGION 1..944: note = Variant of the Homo Sapiens Lysosomal alpha-glucosidase
MEWSWVFLFFLSVTTGVHSGHILWHDFSTVPRELSGSSQVLEETHPAHQVGASRPGPRDAQLHPGRPRAVPTQCDVPENSRFDCAPTKAITQEQCEARGCCYIPAKQGLQGAQMGQPWCFFPPSYPSYKLENLSQSEMGYTATLTRTTPSFFPKDILTLRLDVMMETENRLHFTIKDPANRRYEVPLETPHVHSRAPSPLYSVEFSEEPFGVIVRRQLDGRVLLNTTVAPLFFADQFLQLSTSLPSQYITGLAEHLSPLMLSTSWNKITLWNRDLAPTPGANLYGSHPFYLALEDGGSAHGVFLLNSNAMDVVLQPSPALSWRSTGGILDVYIFLGPEPKSVVQQYLDVVGYPFMPPYWGLGFHLCRWGYSSTAITRQVVENMTRAHFPLDVQWNDLDYMDSRRDFTFNKDGFRDFPAMVQELHQGGRRYMMIVDPGISSSGPAGSYRPYDEGLRRGVFITNETGQPLIGKVWPGSTAFPDFTNPEALAWWEDMVAEFHDQVPFDGMWIDMNEPSNFIRGSVDGCPNNELENPPYVPGVVGGTLQAATICASSHQFLSTHYNLHNLYGTTEAIASHRALVKARGTRPFVISRSTFAGHGRYAGHWTGDVWSSWEQLASSVPEILQFNLLGVPLVGADVCGFLGNTSEELCVRWTQLGAFYPFMRNHNSLTSLPQEPYSFSEPAQQAMRKALGLRYALLPHLYTLFHQAHVHGETVARPLFLEFPKDSSTWTVDHQMLWGEALLITPVLQPGKAEVTGYFPLGTWYDLQTVPVEALGSLPPPPAAPREPAIHSEGQWVTLPAPLDTINVHLREGYIIPLQGPGLTTTESRKQPMALAVALTKSGEARGELFWDDGESLEVLERGAYTQVIFEARNNTIVNELVHVTSEGAGLQLGKVTVLGVATAPQQVLSNGRPVSNFTYSPDTKVLDICVALLMGEQFLVSWC

SEQ ID NO: 469 - DNA, 2832 bp, synthetic construct
  misc_feature 1..2832: note = Variant of the Homo Sapiens Lysosomal alpha-glucosidase
  source 1..2832: mol_type = other DNA
atggaatggagctgggtctttctcttcttcctgtcagtaacgactggtgtccactccggacacattctgtggcatgatttttctaccgtgcctagagagctttccggttcaagtcaagtcctcgaagaaacacatccagcccatcaggttggcgcatctaggccgggccctcgggacgctcaactccacccagggagacctagggccgttcccactcagtgcgacgtgccagagaactcacgcttcgattgtgcacctgagaaggctatcacgcaagagcagtgcgaggcccgcggatgttgttacataccggctaaacaggggctgcagggtgcgcagatgggccaaccttggtgcttcttcccaccatcctatccgagttacaagctggagaatctctcccagtctgaaatgggatataccgcaacactgactcggaccaccccctccttctttcccaaagatatcttgactctgagacttgacgtaatgatggagacagaaaacaggctccactttaccattaaggaccctgccaatcgccgatacgaggtgcctctggaaacaccacacgtgcacagtagagctccatcacctctgtattctgtcgagttctccgaagagccgtttggcgttatcgtcaggaggcagctcgacgggcgagtgcttctgaacacgactgtggccccgttgttctttgcggatcagtttctgcaactgtcaacaagtctcccttctcagtacattaccgggcttgcagagcatctgtccccactcatgctgagtacttcatggaacaaaatcacactgtggaatagagaccttgctcctactccaggagccaacttgtatggttctcaccctttctacttggccctggaagatggcggatcagcgcatggcgtattcctcctgaattccaacgcaatggacgttgttcttcagccatctcctgctttgagttggagatctacaggcgggatactggacgtctacatctttctgggtccagagcctaaatccgtagtgcagcagtatcttgatgtcgtcggatacccgtttatgccaccatattggggcctggggttccacttgtgccgctggggatattcatccaccgccattacacgacaagttgttgagaatatgaccagggcacattttcctctggatgtacagtggaacgacctggactacatggatagtcgccgcgacttcaccttcaataaggatgggttcagagactttcctgctatggtccaagaacttcaccagggaggcaggaggtacatgatgatcgtagatccgggaatttcttcttctggcccagccggttcatacagaccgtatgacgaaggactgcgacgaggcgtctttatcacgaacgagactggtcagcctttgataggcaaggtttggccagggtccaccgctttcccggatttcacaaatcctgaggcactggcctggtgggaagatatggtcgccgagtttcacgaccaggtcccatttgacgggatgtggatcgacatgaacgagccatccaacttcattagaggaagtacggatggctgtccgaataatgagctggaaaaccctccttacgtaccaggcgttgttggtgggactcttcaagctgcgacgatttgcgcatcctcccatcagttcctgtcaacccactataacttgcacaatctgtacgggacaacagaggctatcgccagtcatagggccctggtaaaagctagaggaacacgccctttcgttatctctcgctcaacttttgcaggccacggtaggtatgccggacattggaccggcgacgtctggagttcttgggaacagctggcttcctccgttccagagatattgcagtttaacctgttgggagtcccacttgtaggtgcagatgtttgtggcttcctggggaacacctcagaagaattgtgcgtaagatggactcaactgggcgccttctacccttttatgcgcaatcacaactcactgacatctttgcctcaagaaccgtactcatttagtgagccagcacagcaggccatgaggaaggctcttggcctgagatatgcacttctgccgcatctgtacacccttttccaccaggctcatgtccatggagagactgttgcacgacctctgttcttggagttcccaaaagactcttccacgtggacagtcgatcaccagatgctgtggggcgaggctctgctgattacacctgtattgcaacctggtaaggccgaagttaccgggtactttccattggggacctggtatgatctgcaaacagtcccggttgaagctcttggaagtcttccacctccacctgctgcaccaagggagcctgcgatccactctgaaggacagtgggtaactttgcctgcaccgctggacaccatcaatgtccatctgcgcgaaggctacatcataccacttcaaggtcctggactgaccactacagagtctagaaaacaaccaatggctcttgctgttgcactgactaaaagcggcgaagcaaggggtgagctgttctgggacgacggagagtcactggaggtactcgaacgaggcgcgtatacgcaggtcatttttgaggctcgcaataatacgatcgttaacgagctggtccacgtcacttcagaaggtgcaggccttcagttgggcaaggtaactgtcctgggagttgctacagcaccgcagcaggtcttgtccaacggacggcccgtaagcaactttacctatagtcctgataccaaagttctggacatctgcgttgctctgctgatgggtgagcagttcctggtatcatggtgc

SEQ ID NO: 470 - protein, 944 aa, synthetic construct
  REGION 1..944: note = Variant of the Homo Sapiens Lysosomal alpha-glucosidase
MEWSWVFLFFLSVTTGVHSGHILWHDFSTVPRELSGSSQVLEETHPAHQVGASRPGPRDAQLHPGRPRAVPTQCDVPENSRFDCAPEKAITQEQCEARGCCYIPAKQGLQGAQMGQPWCFFPPSYPSYKLENLSQSEMGYTATLTRTTPSFFPKDILTLRLDVMMETENRLHFTIKDPANRRYEVPLETPHVHSRAPSPLYSVEFSEEPFGVIVRRQLDGRVLLNTTVAPLFFADQFLQLSTSLPSQYITGLAEHLSPLMLSTSWNKITLWNRDLAPTPGANLYGSHPFYLALEDGGSAHGVFLLNSNAMDVVLQPSPALSWRSTGGILDVYIFLGPEPKSVVQQYLDVVGYPFMPPYWGLGFHLCRWGYSSTAITRQVVENMTRAHFPLDVQWNDLDYMDSRRDFTFNKDGFRDFPAMVQELHQGGRRYMMIVDPGISSSGPAGSYRPYDEGLRRGVFITNETGQPLIGKVWPGSTAFPDFTNPEALAWWEDMVAEFHDQVPFDGMWIDMNEPSNFIRGSTDGCPNNELENPPYVPGVVGGTLQAATICASSHQFLSTHYNLHNLYGTTEAIASHRALVKARGTRPFVISRSTFAGHGRYAGHWTGDVWSSWEQLASSVPEILQFNLLGVPLVGADVCGFLGNTSEELCVRWTQLGAFYPFMRNHNSLTSLPQEPYSFSEPAQQAMRKALGLRYALLPHLYTLFHQAHVHGETVARPLFLEFPKDSSTWTVDHQMLWGEALLITPVLQPGKAEVTGYFPLGTWYDLQTVPVEALGSLPPPPAAPREPAIHSEGQWVTLPAPLDTINVHLREGYIIPLQGPGLTTTESRKQPMALAVALTKSGEARGELFWDDGESLEVLERGAYTQVIFEARNNTIVNELVHVTSEGAGLQLGKVTVLGVATAPQQVLSNGRPVSNFTYSPDTKVLDICVALLMGEQFLVSWC

SEQ ID NO: 471 - DNA, 2832 bp, synthetic construct
  misc_feature 1..2832: note = Variant of the Homo Sapiens Lysosomal alpha-glucosidase
  source 1..2832: mol_type = other DNA
atggaatggagctgggtctttctcttcttcctgtcagtaacgactggtgtccactccggacacattctgaaacatgatttttctaccgtgcctagagagctttccggttcaagtcaagtcctcgaagaaacacatccagcccatcaggttggcgcatctaggccgggccctcgggacgctcaactccacccagggagacctagggccgttcccactcagtgcgacgtgccagagaactcacgcttcgattgtgcacctgagaaggctatcacgcaagagcagtgcgaggcccgcggatgttgttacataccggctaaacaggggctgcagggtgcgcagatgggccaaccttggtgcttcttcccaccatcctatccgagttacaagctggagaatctctcccagtctgaaatgggatataccgcaacactgactcggaccaccccctccttctttcccaaagatatcttgactctgagacttgacgtaatgatggagacagaaaacaggctccactttaccattaaggaccctgccaatcgccgatacgaggtgcctctggaaacaccacacgtgcacagtagagctccatcacctctgtattctgtcgagttctccgaagagccgtttggcgttatcgtcaggaggcagctcgacgggcgagtgcttctgaacacgactgtggccccgttgttctttgcggatcagtttctgcaactgtcaacaagtctcccttctcagtacattaccgggcttgcagagcatctgtccccactcatgctgagtacttcatggaacaaaatcacactgtggaatagagaccttgctcctactccaggagccaacttgtatggttctcaccctttctacttggccctggaagatggcggatcagcgcatggcgtattcctcctgaattccaacgcaatggacgttgttcttcagccatctcctgctttgagttggagatctacaggcgggatactggacgtctacatctttctgggtccagagcctaaatccgtagtgcagcagtatcttgatgtcgtcggatacccgtttatgccaccatattggggcctggggttccacttgtgccgctggggatattcatccaccgccattacacgacaagttgttgagaatatgaccagggcacattttcctctggatgtacagtggaacgacctggactacatggatagtcgccgcgacttcaccttcaataaggatgggttcagagactttcctgctatggtccaagaacttcaccagggaggcaggaggtacatgatgatcgtagatccgggaatttcttcttctggcccagccggttcatacagaccgtatgacgaaggactgcgacgaggcgtctttatcacgaacgagactggtcagcctttgataggcaaggtttggccagggtccaccgctttcccggatttcacaaatcctgaggcactggcctggtgggaagatatggtcgccgagtttcacgaccaggtcccatttgacgggatgtggatcgacatgaacgagccatccaacttcattagaggaagtgtggatggctgtccgaataatgagctggaaaaccctccttacgtaccaggcgttgttggtgggactcttcaagctgcgacgatttgcgcatcctcccatcagttcctgtcaacccactataacttgcacaatctgtacgggacaacagaggctatcgccagtcatagggccctggtaaaagctagaggaacacgccctttcgttatctctcgctcaacttttgcaggccacggtaggtatgccggacattggaccggcgacgtctggagttcttgggaacagctggcttcctccgttccagagatattgcagtttaacctgttgggagtcccacttgtaggtgcagatgtttgtggcttcctggggaacacctcagaagaattgtgcgtaagatggactcaactgggcgccttctacccttttatgcgcaatcacaactcactgacatctttgcctcaagaaccgtactcatttagtgagccagcacagcaggccatgaggaaggctcttggcctgagatatgcacttctgccgcatctgtacacccttttccaccaggctcatgtccatggagagactgttgcacgacctctgttcttggagttcccaaaagactcttccacgtggacagtcgatcaccagatgctgtggggcgaggctctgctgattacacctgtattgcaacctggtaaggccgaagttaccgggtactttccattggggacctggtatgatctgcaaacagtcccggttgaagctcttggaagtcttccacctccacctgctgcaccaagggagcctgcgatccactctgaaggacagtgggtaactttgcctgcaccgctggacaccatcaatgtccatctgcgcgaaggctacatcataccacttcaaggtcctggactgaccactacagagtctagaaaacaaccaatggctcttgctgttgcactgactaaaagcggcgaagcaaggggtgagctgttctgggacgacggagagtcactggaggtactcgaacgaggcgcgtatacgcaggtcatttttgaggctcgcaataatacgatcgttaacgagctggtccacgtcacttcagaaggtgcaggccttcagttgggcaaggtaactgtcctgggagttgctacagcaccgcagcaggtcttgtccaacggacggcccgtaagcaactttacctatagtcctgataccaaagttctggacatctgcgttgctctgctgatgggtgagcagttcctggtatcatggtgc

SEQ ID NO: 472 - protein, 944 aa, synthetic construct
  REGION 1..944: note = Variant of the Homo Sapiens Lysosomal alpha-glucosidase
MEWSWVFLFFLSVTTGVHSGHILKHDFSTVPRELSGSSQVLEETHPAHQVGASRPGPRDAQLHPGRPRAVPTQCDVPENSRFDCAPEKAITQEQCEARGCCYIPAKQGLQGAQMGQPWCFFPPSYPSYKLENLSQSEMGYTATLTRTTPSFFPKDILTLRLDVMMETENRLHFTIKDPANRRYEVPLETPHVHSRAPSPLYSVEFSEEPFGVIVRRQLDGRVLLNTTVAPLFFADQFLQLSTSLPSQYITGLAEHLSPLMLSTSWNKITLWNRDLAPTPGANLYGSHPFYLALEDGGSAHGVFLLNSNAMDVVLQPSPALSWRSTGGILDVYIFLGPEPKSVVQQYLDVVGYPFMPPYWGLGFHLCRWGYSSTAITRQVVENMTRAHFPLDVQWNDLDYMDSRRDFTFNKDGFRDFPAMVQELHQGGRRYMMIVDPGISSSGPAGSYRPYDEGLRRGVFITNETGQPLIGKVWPGSTAFPDFTNPEALAWWEDMVAEFHDQVPFDGMWIDMNEPSNFIRGSVDGCPNNELENPPYVPGVVGGTLQAATICASSHQFLSTHYNLHNLYGTTEAIASHRALVKARGTRPFVISRSTFAGHGRYAGHWTGDVWSSWEQLASSVPEILQFNLLGVPLVGADVCGFLGNTSEELCVRWTQLGAFYPFMRNHNSLTSLPQEPYSFSEPAQQAMRKALGLRYALLPHLYTLFHQAHVHGETVARPLFLEFPKDSSTWTVDHQMLWGEALLITPVLQPGKAEVTGYFPLGTWYDLQTVPVEALGSLPPPPAAPREPAIHSEGQWVTLPAPLDTINVHLREGYIIPLQGPGLTTTESRKQPMALAVALTKSGEARGELFWDDGESLEVLERGAYTQVIFEARNNTIVNELVHVTSEGAGLQLGKVTVLGVATAPQQVLSNGRPVSNFTYSPDTKVLDICVALLMGEQFLVSWC

SEQ ID NO: 473 - DNA, 2832 bp, synthetic construct
  misc_feature 1..2832: note = Variant of the Homo Sapiens Lysosomal alpha-glucosidase
  source 1..2832: mol_type = other DNA
atggaatggagctgggtctttctcttcttcctgtcagtaacgactggtgtccactccggacacattctgtggcatgatttttctaccgtgcctagagagctttccggttcaagtcaagtcctcgaagaaacacatccagcccatcaggttggcgcatctaggccgggccctcgggacgctcaactccacccagggagacctagggccgttcccactcagtgcgacgtgccagagaactcacgcttcgattgtgcacctgagaaggctatcacgcaagagcagtgcgaggcccgcggatgttgttacataccggctaaacaggggctgcagggtgcgcagatgggccaaccttggtgcttcttcccaccatcctatccgagttacaagctggagaatctctcccagtctgaaatgggatataccgcaacactgactcggaccaccccctccttctttcccaaagatatcttgactctgagacttgacgtaatgatggagacagaaaacaggctccactttaccattaaggaccctgccaatcgccgatacgaggtgcctctggaaacaccacacgtgcacagtagagctccatcacctctgtattctgtcgagttctccgaagagccgtttggcgttatcgtcaggaggcagctcgacgggcgagtgcttctgaacacgactgtggccccgttgttctttgcggatcagtttctgcaactgtcaacaagtctcccttctcagtacattaccgggcttgcagagcatctgtccccactcatgctgagtacttcatggaacaaaatcacactgtggaatagagaccttgctcctactccaggagccaacttgtatggttctcaccctttctacttggccctggaagatggcggatcagcgcatggcgtattcctcctgaattccaacgcaatggacgttgttcttcagccatctcctgctttgagttggagatctacaggcgggatactggacgtctacatctttctgggtccagagcctaaatccgtagtgcagcagtatcttgatgtcgtcggatacccgtttatgccaccatattggggcctggggttccacttgtgccgctggggatattcatccaccgccattacacgacaagttgttgagaatatgaccagggcacattttcctctggatgtacagtggaacgacctggactacatggatagtcgccgcgacttcaccttcaataaggatgggttcagagactttcctgctatggtccaagaacttcaccagggaggcaggaggtacatgatgatcgtagatccgggaatttcttcttctggcccagccggttcatacagaccgtatgacgaaggactgcgacgaggcgtctttatcacgaacgagactggtcagcctttgataggcaaggtttggccagggtccaccgctttcccggatttcacaaatcctgaggcactggcctggtgggaagatatggtcgccgagtttcacgaccaggtcccatttgacgggatgtggatcgacatgaacgagccatccaacttcattagaggaagtgtggatggctgtccgaataatgagctggaaaaccctccttacgtaccaggcgttgttggtgggactcttcaagctgcgacgatttgcgcatcctcccatcagttcctgtcaacccactataacttgcacaatctgtacgggacaacagaggctatcgccagtcatagggccctggtaaaagctagaggaacacgccctttcgttatctctcgctcaacttttgcaggccacggtaggtatgccggacattggaccggcgacgtctggagttcttgggaacagctggcttcctccgttccagagatattgcagtttaacctgttgggagtcccacttgtaggtgcagatgtttgtggcttcctggggaacacctcagaagaattgtgcgtaagatggactcaactgggcgccttctacccttttatgcgcaatcacaactcactgacatctttgcctcaagaaccgtactcatttagtgagccagcacagcaggccatgaggaaggctcttggcctgagatatgcacttctgccgcatctgtacacccttttccaccaggctcatgtccatggagagactgttgcacgacctctgttcttggagttcccaaaagactcttccacgtggacagtcgatcaccagatgctgtggggcgaggctctgctgattacacctgtattgcaacctggtaaggccgaagttaccgggtactttccattggggacctggtatgatctgcaaacagtcccggttgaagctcttggaagtcttccacctccacctgctgcaccaagggagcctgcgatccactctgaaggacagtgggtaactttgcctgcaccgctggacaccatcaatgtccatctgcgcgaaggctacatcataccacttcaaggtcctggactgaccactacagagtctagaaaacaaccaatggctcttgctgttgcactgactaaaagcggcgaagcaaggggtgagctgttctgggacgacggagagtcactggaggtactcgaacgaggcgcgtatacgcaggtcatttttaaggctcgcaataatacgatcgttaacgagctggtccacgtcacttcagaaggtgcaggccttcagttgggcaaggtaactgtcctgggagttgctacagcaccgcagcaggtcttgtccaacggacggcccgtaagcaactttacctatagtcctgataccaaagttctggacatctgcgttgctctgctgatgggtgagcagttcctggtatcatggtgc

SEQ ID NO: 474 - protein, 944 aa, synthetic construct
  REGION 1..944: note = Variant of the Homo Sapiens Lysosomal alpha-glucosidase
MEWSWVFLFFLSVTTGVHSGHILWHDFSTVPRELSGSSQVLEETHPAHQVGASRPGPRDAQLHPGRPRAVPTQCDVPENSRFDCAPEKAITQEQCEARGCCYIPAKQGLQGAQMGQPWCFFPPSYPSYKLENLSQSEMGYTATLTRTTPSFFPKDILTLRLDVMMETENRLHFTIKDPANRRYEVPLETPHVHSRAPSPLYSVEFSEEPFGVIVRRQLDGRVLLNTTVAPLFFADQFLQLSTSLPSQYITGLAEHLSPLMLSTSWNKITLWNRDLAPTPGANLYGSHPFYLALEDGGSAHGVFLLNSNAMDVVLQPSPALSWRSTGGILDVYIFLGPEPKSVVQQYLDVVGYPFMPPYWGLGFHLCRWGYSSTAITRQVVENMTRAHFPLDVQWNDLDYMDSRRDFTFNKDGFRDFPAMVQELHQGGRRYMMIVDPGISSSGPAGSYRPYDEGLRRGVFITNETGQPLIGKVWPGSTAFPDFTNPEALAWWEDMVAEFHDQVPFDGMWIDMNEPSNFIRGSVDGCPNNELENPPYVPGVVGGTLQAATICASSHQFLSTHYNLHNLYGTTEAIASHRALVKARGTRPFVISRSTFAGHGRYAGHWTGDVWSSWEQLASSVPEILQFNLLGVPLVGADVCGFLGNTSEELCVRWTQLGAFYPFMRNHNSLTSLPQEPYSFSEPAQQAMRKALGLRYALLPHLYTLFHQAHVHGETVARPLFLEFPKDSSTWTVDHQMLWGEALLITPVLQPGKAEVTGYFPLGTWYDLQTVPVEALGSLPPPPAAPREPAIHSEGQWVTLPAPLDTINVHLREGYIIPLQGPGLTTTESRKQPMALAVALTKSGEARGELFWDDGESLEVLERGAYTQVIFKARNNTIVNELVHVTSEGAGLQLGKVTVLGVATAPQQVLSNGRPVSNFTYSPDTKVLDICVALLMGEQFLVSWC

SEQ ID NO: 475 - DNA, 2832 bp, synthetic construct
  misc_feature 1..2832: note = Variant of the Homo Sapiens Lysosomal alpha-glucosidase
  source 1..2832: mol_type = other DNA
atggaatggagctgggtctttctcttcttcctgtcagtaacgactggtgtccactccggacacattctgtggcatgatttttctaccgtgcctagagagctttccggttcaagtcaagtcctcgaagaaacacatccagcccatcaggttggcgcatctaggccgggccctcgggacgctcaactccacccagggagacctagggccgttcccactcagtgcgacgtgccagagaactcacgcttcgattgtgcacctgagaaggctatcacgcaagagcagtgcgaggcccgcggatgttgttacataccggctaaacaggggctgcagggtgcgcagatgggccaaccttggtgcttcttcccaccatcctatccgagttacaagctggagaatctctcccagtctgaaatgggatataccgcaacactgactcggaccaccccctccttctttcccaaagatatcttgactctgagacttgacgtaatgatggagacagaaaacaggctccactttaccattaaggaccctgccaatcgccgatacgaggtgcctctggaaacaccacacgtgcacagtagagctccatcacctctgtattctgtcgagttctccgaagagccgtttggcgttatcgtcaggaggcagctcgacgggcgagtgcttctgaacacgactgtggccccgttgttctttgcggatcagtttctgcaactgtcaacaagtctcccttctcagtacattaccgggcttgcagagcatctgtccccactcatgctgagtacttcatggaacaaaatcacactgtggaatagagaccttgctcctactccaggagccaacttgtatggttctcaccctttctacttggccctggaagatggcggatcagcgcatggcgtattcctcctgaattccaacgcaatggacgttgttcttcagccatctcctgctttgagttggagatctacaggcgggatactggacgtctacatctttctgggtccagagcctaaatccgtagtgcagcagtatcttgatgtcgtcggatacccgtttatgccaccatattggggcctggggttccacttgtgccgctggggatattcatccaccgccattacacgacaagttgttgagaatatgaccagggcacattttcctctggatgtacagtggaacgacctggactacatggatagtcgccgcgacttcaccttcaataaggatgggttcagagactttcctgctatggtccaagaacttcaccagggaggcaggaggtacatgatgatcgtagatccgggaatttcttcttctggcccagccggttcatacagaccgtatgacgaaggactgcgacgaggcgtctttatcacgaacgagactggtcagcctttgataggcaaggtttggccagggtccaccgctttcccggatttcacaaatcctgaggcactggcctggtgggaagatatggtcgccgagtttcacgaccaggtcccatttgacgggatgtggatcgacatgaacgagccatccaacttcattagaggaagtgtggatggctgtccgaataatgagctggaaaaccctccttacgtaccaggcgttgttggtgggactcttcaagctgcgacgatttgcgcatcctcccatcagttcctgtcaacccactataacttgcacaatctgtacgggacaacagaggctatcgccagtcatagggccctggtaaaagctagaggaacacgccctttcgttatctctcgctcaacttttgcaggccacggtaggtatgccggacattggaccggcgacgtctggagttcttgggaacagctggcttcctccgttccagagatattgcagtttaacctgttgggagtcccacttgtaggtgcagatgtttgtggcttcctggggaacacctcagaagaattgtgcgtaagatggactcaactgggcgccttctacccttttatgcgcaatcacaactcactgacatctttgcctcaagaaccgtactcatttagtgagccagcacagcaggccatgaggaaggctcttggcctgagatatgcacttctgccgcatctgtacacccttttccaccaggctcatgtccatggagagactgttgcacgacctctgttcttggagttcccaaaagactcttccacgtggacagtcgatcaccagatgctgtggggcgaggctctgctgattacacctgtattgcaagagggtaaggccgaagttaccgggtactttccattggggacctggtatgatctgcaaacagtcccggttgaagctcttggaagtcttccacctccacctgctgcaccaagggagcctgcgatccactctgaaggacagtgggtaactttgcctgcaccgctggacaccatcaatgtccatctgcgcgaaggctacatcataccacttcaaggtcctggactgaccactacagagtctagaaaacaaccaatggctcttgctgttgcactgactaaaagcggcgaagcaaggggtgagctgttctgggacgacggagagtcactggaggtactcgaacgaggcgcgtatacgcaggtcatttttgaggctcgcaataatacgatcgttaacgagctggtccacgtcacttcagaaggtgcaggccttcagttgggcaaggtaactgtcctgggagttgctacagcaccgcagcaggtcttgtccaacggacggcccgtaagcaactttacctatagtcctgataccaaagttctggacatctgcgttgctctgctgatgggtgagcagttcctggtatcatggtgc

SEQ ID NO: 476 - protein, 944 aa, synthetic construct
  REGION 1..944: note = Variant of the Homo Sapiens Lysosomal alpha-glucosidase
MEWSWVFLFFLSVTTGVHSGHILWHDFSTVPRELSGSSQVLEETHPAHQVGASRPGPRDAQLHPGRPRAVPTQCDVPENSRFDCAPEKAITQEQCEARGCCYIPAKQGLQGAQMGQPWCFFPPSYPSYKLENLSQSEMGYTATLTRTTPSFFPKDILTLRLDVMMETENRLHFTIKDPANRRYEVPLETPHVHSRAPSPLYSVEFSEEPFGVIVRRQLDGRVLLNTTVAPLFFADQFLQLSTSLPSQYITGLAEHLSPLMLSTSWNKITLWNRDLAPTPGANLYGSHPFYLALEDGGSAHGVFLLNSNAMDVVLQPSPALSWRSTGGILDVYIFLGPEPKSVVQQYLDVVGYPFMPPYWGLGFHLCRWGYSSTAITRQVVENMTRAHFPLDVQWNDLDYMDSRRDFTFNKDGFRDFPAMVQELHQGGRRYMMIVDPGISSSGPAGSYRPYDEGLRRGVFITNETGQPLIGKVWPGSTAFPDFTNPEALAWWEDMVAEFHDQVPFDGMWIDMNEPSNFIRGSVDGCPNNELENPPYVPGVVGGTLQAATICASSHQFLSTHYNLHNLYGTTEAIASHRALVKARGTRPFVISRSTFAGHGRYAGHWTGDVWSSWEQLASSVPEILQFNLLGVPLVGADVCGFLGNTSEELCVRWTQLGAFYPFMRNHNSLTSLPQEPYSFSEPAQQAMRKALGLRYALLPHLYTLFHQAHVHGETVARPLFLEFPKDSSTWTVDHQMLWGEALLITPVLQEGKAEVTGYFPLGTWYDLQTVPVEALGSLPPPPAAPREPAIHSEGQWVTLPAPLDTINVHLREGYIIPLQGPGLTTTESRKQPMALAVALTKSGEARGELFWDDGESLEVLERGAYTQVIFEARNNTIVNELVHVTSEGAGLQLGKVTVLGVATAPQQVLSNGRPVSNFTYSPDTKVLDICVALLMGEQFLVSWC

SEQ ID NO: 477 - DNA, 2832 bp, synthetic construct
  misc_feature 1..2832: note = Variant of the Homo Sapiens Lysosomal alpha-glucosidase
  source 1..2832: mol_type = other DNA
atggaatggagctgggtctttctcttcttcctgtcagtaacgactggtgtccactccggacacattctgtggcatgatttttctaccgtgcctagagagctttccggttcaagtcaagtcctcgaagaaacacatccagcccatcaggttggcgcatctaggccgggccctcgggacgctcaactccacccagggagacctagggccgttcccactcagtgcgacgtgccagagaactcacgcttcgattgtgcacctgagaaggctatcacgcaagagcagtgcgaggcccgcggatgttgttacataccggctaaacaggggctgcagggtgcgcagatgggccaaccttggtgcttcttcccaccatcctatccgagttacaagctggagaatctctcccagtctgaaatgggatataccgcaacactgactcggaccaccccctccttctttcccaaagatatcttgactctgagacttgacgtaatgatggagacagaaaacaggctccactttaccattaaggaccctgccaatcgccgatacgaggtgcctctggaaacaccacacgtgcacagtagagctccatcacctctgtattctgtcgagttctccgaagagccgtttggcgttatcgtcaggaggcagctcgacgggcgagtgcttctgaacacgactgtggccccgttgttctttgcggatcagtttctgcaactgtcaacaagtctcccttctcagtacattaccgggcttgcagagcatctgtccccactcatgctgagtacttcatggaacaaaatcacactgtggaatagagaccttgctcctactccaggagccaacttgtatggttctcaccctttctacttggccctggaagatggcggatcagcgcatggcgtattcctcctgaattccaacgcaatggacgttgttcttcagccatctcctgctttgagttggagatctacaggcgggatactggacgtctacatctttctgggtccagagcctaaatccgtagtgcagcagtatcttgatgtcgtcggatacccgtttatgccaccatattggggcctggggttccacttgtgccgctggggatattcatccaccgccattacacgacaagttgttgagaatatgaccagggcacattttcctctggatgtacagtggaacgacctggactacatggatagtcgccgcgacttcaccttcaataaggatgggttcagagactttcctgctatggtccaagaacttcaccagggaggcaggaggtacatgatgatcgtagatccgggaatttcttcttctggcccagccggttcatacagaccgtatgacgaaggactgcgacgaggcgtctttatcacgaacgagactggtcagcctttgataggcaaggtttggccagggtccaccgctttcccggatttcacaaatcctgaggcactggcctggtgggaagatatggtcgccgagtttcacgaccaggtcccatttgacgggatgtggatcgacatgaacgagccatccaacttcattagaggaagtgtggatggctgtccgaataatgagctggaaaaccctccttacgtaccaggcgttgttggtgggactcttcaagctgcgacgatttgcgcatcctcccatcagttcctgtcaacccactataacttgcacaatctgtacgggacaacagaggctatcgccagtcatagggccctggtaaaagctagaggaacacgccctttcgttatctctcgctcaacttttgcaggccacggtaggtatgccggacattggaccggcgacgtctggagttcttgggaacagctggcttcctccgttccagagatattgcagtttaacctgttgggagtcccacttgtaggtgcagatgtttgtggcttcctggggaacacctcagaagaattgtgcgtaagatggactcaactgggcgccttctacccttttatgcgcaatcacaactcactgacatctttgcctcaagaaccgtactcatttagtgagccagcacagcaggccatgaggaaggctcttggcctgagatatgcacttctgccgcatctgtacacccttttccaccaggctcatgtccatggagagactgttgcacgacctctgttcttggagttcccaaaagactcttccacgtggacagtcgatcaccagatgctgtggggcgaggctctgctgattacacctgtattgcaacctggtaaggccgaagttaccgggtactttccattggggacctggtatgatctgcaaacagtcccggttgaagctcttggaagtcttccacctccacctgctgcaccaagggagcctgcgatccactctgaaggacagtgggtaactttgcctgcaccgctggacaccatcaatgtccatctgcgcgaaggctacatcataccacttcaaggtcctggactgaccactacagagtctagaacccaaccaatggctcttgctgttgcactgactaaaagcggcgaagcaaggggtgagctgttctgggacgacggagagtcactggaggtactcgaacgaggcgcgtatacgcaggtcatttttgaggctcgcaataatacgatcgttaacgagctggtccacgtcacttcagaaggtgcaggccttcagttgggcaaggtaactgtcctgggagttgctacagcaccgcagcaggtcttgtccaacggacggcccgtaagcaactttacctatagtcctgataccaaagttctggacatctgcgttgctctgctgatgggtgagcagttcctggtatcatggtgc

SEQ ID NO: 478 - protein, 944 aa, synthetic construct
  REGION 1..944: note = Variant of the Homo Sapiens Lysosomal alpha-glucosidase
MEWSWVFLFFLSVTTGVHSGHILWHDFSTVPRELSGSSQVLEETHPAHQVGASRPGPRDAQLHPGRPRAVPTQCDVPENSRFDCAPEKAITQEQCEARGCCYIPAKQGLQGAQMGQPWCFFPPSYPSYKLENLSQSEMGYTATLTRTTPSFFPKDILTLRLDVMMETENRLHFTIKDPANRRYEVPLETPHVHSRAPSPLYSVEFSEEPFGVIVRRQLDGRVLLNTTVAPLFFADQFLQLSTSLPSQYITGLAEHLSPLMLSTSWNKITLWNRDLAPTPGANLYGSHPFYLALEDGGSAHGVFLLNSNAMDVVLQPSPALSWRSTGGILDVYIFLGPEPKSVVQQYLDVVGYPFMPPYWGLGFHLCRWGYSSTAITRQVVENMTRAHFPLDVQWNDLDYMDSRRDFTFNKDGFRDFPAMVQELHQGGRRYMMIVDPGISSSGPAGSYRPYDEGLRRGVFITNETGQPLIGKVWPGSTAFPDFTNPEALAWWEDMVAEFHDQVPFDGMWIDMNEPSNFIRGSVDGCPNNELENPPYVPGVVGGTLQAATICASSHQFLSTHYNLHNLYGTTEAIASHRALVKARGTRPFVISRSTFAGHGRYAGHWTGDVWSSWEQLASSVPEILQFNLLGVPLVGADVCGFLGNTSEELCVRWTQLGAFYPFMRNHNSLTSLPQEPYSFSEPAQQAMRKALGLRYALLPHLYTLFHQAHVHGETVARPLFLEFPKDSSTWTVDHQMLWGEALLITPVLQPGKAEVTGYFPLGTWYDLQTVPVEALGSLPPPPAAPREPAIHSEGQWVTLPAPLDTINVHLREGYIIPLQGPGLTTTESRTQPMALAVALTKSGEARGELFWDDGESLEVLERGAYTQVIFEARNNTIVNELVHVTSEGAGLQLGKVTVLGVATAPQQVLSNGRPVSNFTYSPDTKVLDICVALLMGEQFLVSWC

SEQ ID NO: 479 - DNA, 2832 bp, synthetic construct
  misc_feature 1..2832: note = Variant of the Homo Sapiens Lysosomal alpha-glucosidase
  source 1..2832: mol_type = other DNA
atggaatggagctgggtctttctcttcttcctgtcagtaacgactggtgtccactccggacacattctgtggcatgatttttctaccgtgcctagagagctttccggttcaagtcaagtcctcgaagaaacacatccagcccatcagatcggcgcatctaggccgggccctcgggacgctcaactccacccagggagacctagggccgttcccactcagtgcgacgtgccagagaactcacgcttcgattgtgcacctgagaaggctatcacgcaagagcagtgcgaggcccgcggatgttgttacataccggctaaacaggggctgcagggtgcgcagatgggccaaccttggtgcttcttcccaccatcctatccgagttacaagctggagaatctctcccagtctgaaatgggatataccgcaacactgactcggaccaccccctccttctttcccaaagatatcttgactctgagacttgacgtaatgatggagacagaaaacaggctccactttaccattaaggaccctgccaatcgccgatacgaggtgcctctggaaacaccacacgtgcacagtagagctccatcacctctgtattctgtcgagttctccgaagagccgtttggcgttatcgtcaggaggcagctcgacgggcgagtgcttctgaacacgactgtggccccgttgttctttgcggatcagtttctgcaactgtcaacaagtctcccttctcagtacattaccgggcttgcagagcatctgtccccactcatgctgagtacttcatggaacaaaatcacactgtggaatagagaccttgctcctactccaggagccaacttgtatggttctcaccctttctacttggccctggaagatggcggatcagcgcatggcgtattcctcctgaattccaacgcaatggacgttgttcttcagccatctcctgctttgagttggagatctacaggcgggatactggacgtctacatctttctgggtccagagcctaaatccgtagtgcagcagtatcttgatgtcgtcggatacccgtttatgccaccatattggggcctggggttccacttgtgccgctggggatattcatccaccgccattacacgacaagttgttgagaatatgaccagggcacattttcctctggatgtacagtggaacgacctggactacatggatagtcgccgcgacttcaccttcaataaggatgggttcagagactttcctgctatggtccaagaacttcaccagggaggcaggaggtacatgatgatcgtagatccgggaatttcttcttctggcccagccggttcatacagaccgtatgacgaaggactgcgacgaggcgtctttatcacgaacgagactggtcagcctttgataggcaaggtttggccagggtccaccgctttcccggatttcacaaatcctgaggcactggcctggtgggaagatatggtcgccgagtttcacgaccaggtcccatttgacgggatgtggatcgacatgaacgagccatccaacttcattagaggaagtgtggatggctgtccgaataatgagctggaaaaccctccttacgtaccaggcgttgttggtgggactcttcaagctgcgacgatttgcgcatcctcccatcagttcctgtcaacccactataacttgcacaatctgtacgggacaacagaggctatcgccagtcatagggccctggtaaaagctagaggaacacgccctttcgttatctctcgctcaacttttgcaggccacggtaggtatgccggacattggaccggcgacgtctggagttcttgggaacagctggcttcctccgttccagagatattgcagtttaacctgttgggagtcccacttgtaggtgcagatgtttgtggcttcctggggaacacctcagaagaattgtgcgtaagatggactcaactgggcgccttctacccttttatgcgcaatcacaactcactgacatctttgcctcaagaaccgtactcatttagtgagccagcacagcaggccatgaggaaggctcttggcctgagatatgcacttctgccgcatctgtacacccttttccaccaggctcatgtccatggagagactgttgcacgacctctgttcttggagttcccaaaagactcttccacgtggacagtcgatcaccagatgctgtggggcgaggctctgctgattacacctgtattgcaacctggtaaggccgaagttaccgggtactttccattggggacctggtatgatctgcaaacagtcccggttgaagctcttggaagtcttccacctccacctgctgcaccaagggagcctgcgatccactctgaaggacagtgggtaactttgcctgcaccgctggacaccatcaatgtccatctgcgcgaaggctacatcataccacttcaaggtcctggactgaccactacagagtctagaaaacaaccaatggctcttgctgttgcactgactaaaagcggcgaagcaaggggtgagctgttctgggacgacggagagtcactggaggtactcgaacgaggcgcgtatacgcaggtcatttttgaggctcgcaataatacgatcgttaacgagctggtccacgtcacttcagaaggtgcaggccttcagttgggcaaggtaactgtcctgggagttgctacagcaccgcagcaggtcttgtccaacggacggcccgtaagcaactttacctatagtcctgataccaaagttctggacatctgcgttgctctgctgatgggtgagcagttcctggtatcatggtgc

SEQ ID NO: 480 - protein, 944 aa, synthetic construct
  REGION 1..944: note = Variant of the Homo Sapiens Lysosomal alpha-glucosidase
MEWSWVFLFFLSVTTGVHSGHILWHDFSTVPRELSGSSQVLEETHPAHQIGASRPGPRDAQLHPGRPRAVPTQCDVPENSRFDCAPEKAITQEQCEARGCCYIPAKQGLQGAQMGQPWCFFPPSYPSYKLENLSQSEMGYTATLTRTTPSFFPKDILTLRLDVMMETENRLHFTIKDPANRRYEVPLETPHVHSRAPSPLYSVEFSEEPFGVIVRRQLDGRVLLNTTVAPLFFADQFLQLSTSLPSQYITGLAEHLSPLMLSTSWNKITLWNRDLAPTPGANLYGSHPFYLALEDGGSAHGVFLLNSNAMDVVLQPSPALSWRSTGGILDVYIFLGPEPKSVVQQYLDVVGYPFMPPYWGLGFHLCRWGYSSTAITRQVVENMTRAHFPLDVQWNDLDYMDSRRDFTFNKDGFRDFPAMVQELHQGGRRYMMIVDPGISSSGPAGSYRPYDEGLRRGVFITNETGQPLIGKVWPGSTAFPDFTNPEALAWWEDMVAEFHDQVPFDGMWIDMNEPSNFIRGSVDGCPNNELENPPYVPGVVGGTLQAATICASSHQFLSTHYNLHNLYGTTEAIASHRALVKARGTRPFVISRSTFAGHGRYAGHWTGDVWSSWEQLASSVPEILQFNLLGVPLVGADVCGFLGNTSEELCVRWTQLGAFYPFMRNHNSLTSLPQEPYSFSEPAQQAMRKALGLRYALLPHLYTLFHQAHVHGETVARPLFLEFPKDSSTWTVDHQMLWGEALLITPVLQPGKAEVTGYFPLGTWYDLQTVPVEALGSLPPPPAAPREPAIHSEGQWVTLPAPLDTINVHLREGYIIPLQGPGLTTTESRKQPMALAVALTKSGEARGELFWDDGESLEVLERGAYTQVIFEARNNTIVNELVHVTSEGAGLQLGKVTVLGVATAPQQVLSNGRPVSNFTYSPDTKVLDICVALLMGEQFLVSWC

SEQ ID NO: 481 - DNA, 2832 bp, synthetic construct
  misc_feature 1..2832: note = Variant of the Homo Sapiens Lysosomal alpha-glucosidase
  source 1..2832: mol_type = other DNA
atggaatggagctgggtctttctcttcttcctgtcagtaacgactggtgtccactccggacacattctgtggcatgatttttctaccgtgcctagagagctttccggttcaagtcaagtcctcgaagaaacacatccagcccatcaggttggcgcatctaggccgggccctcgggacgctcaactccacccagggagacctagggccgttcccactcagtgcgacgtgccagagaactcacgcttcgattgtgcacctgagaaggctatcacgcaagagcagtgcgaggcccgcggatgttgttacataccggctaaacaggggctgcagggtgcgcagatgggccaaccttggtgcttcttcccaccatcctatccgagttacaagctggagaatctctcccagtctgaaatgggatataccgcaacactgactcggaccaccccctccttctttcccaaagatatcttgactctgagacttgacgtaatgatggagacagaaaacaggctccactttaccattaaggaccctgccaatcgccgatacgaggtgcctctggaaacaccacacgtgcacagtagagctccatcacctctgtattctgtcgagttctccgaagagccgtttggcgttatcgtcaggaggcagctcgacgggcgagtgcttctgaacacgactgtggccccgttgttctttgcggatcagtttctgcaactgtcaacaagtctcccttctcagtacattaccgggcttgcagagcatctgtccccactcatgctgagtacttcatggaacaaaatcacactgtggaatagagaccttgctcctactccaggagccaacttgtatggttctcaccctttctacttggccctggaagatggcggatcagcgcatggcgtattcctcctgaattccaacgcaatggacgttgttcttcagccatctcctgctttgagttggagatctacaggcgggatactggacgtctacatctttctgggtccagagcctaaatccgtagtgcagcagtatcttgatgtcgtcggatacccgtttatgccaccatattggggcctggggttccacttgtgccgctggggatattcatccaccgccattacacgacaagttgttgagaatatgaccagggcacattttcctctggatgtacagtggaacgacctggactacatggatagtcgccgcgacttcaccttcaataaggatgggttcagagactttcctgctatggtccaagaacttcaccagggaggcaggaggtacatgatgatcgtagatccgggaatttcttcttctggcccagccggttcatacagaccgtatgacgaaggactgcgacgaggcgtctttatcacgaacgagactggtcagcctttgataggcaaggtttggccagggtccaccgctttcccggatttcacaaatcctgaggcactggcctggtgggaagatatggtcgccgagtttcacgaccaggtcccatttgacgggatgtggatcgacatgaacgagccatccaacttcattagaggaagtgtggatggctgtccgaataatgagctggaaaaccctccttacgtaccaggcgttgttggtgggactcttcaagctgcgacgatttgcgcatcctcccatcagttcctgtcaacccactataacttgcacaatctgtacgggacaacagaggctatcgccagtcatagggccctggtaaaagctagaggaacacgccctttcgttatctctcgctcaacttttgcaggccacggtaggtatgccggacattggaccggcgacgtctggagttcttgggaacagctggcttcctccgttccagagatattgcagtttaacctgttgggagtcccacttgtaggtgcagatgtttgtggcttcctggggaacacctcagaagaattgtgcgtaagatggactcaactgggcgccttctacccttttatgcgcaatcacaactcactgacatctttgcctcaagaaccgtactcatttagtgagccagcacagcaggccatgaggaaggctcttggcctgagatatgcacttctgccgcatctgtacacccttttccaccaggctcatgtccatggagagactgttgcacgacctctgttcttggagttcccaaaagactcttccacgtggacagtcgatcaccagatgctgtggggcgaggctctgctgattacacctgtattgcaacctggtaaggccgaagttaccgggtactttccattggggacctggtatgatctgcaaacagtcccggttgaagctcttggaagtcttccacctccacctgctgcaccaagggagcctgcgatccactctgaaggacagtgggtaactttgcctgcaccgctggacaccatcaatgtccatctgcgcgaaggctacatcataccacttcaaggtcctggactgaccactacagagtctagaaaacaaccaatggctcttgctgttgcactgactaaaagcggcgaagcaaggggtgagctgttctgggacgacggagagtcactggaggtactcgaacgaggcgcgtatacgcaggtcatttttgaggctcgcaataatacgatcgttaacgagctggtccacgtcacttcagaaggtgcaggccttcagttgggcaaggtaactgtcctgggagttgctacagcaccgcagcaggtcttgtccaacggacggcccgtaagcaactttacctatagtcctgataccaaagttctggacatctgcgttgaactgctgatgggtgagcagttcctggtatcatggtgc

SEQ ID NO: 482 - protein, 944 aa, synthetic construct
  REGION 1..944: note = Variant of the Homo Sapiens Lysosomal alpha-glucosidase
MEWSWVFLFFLSVTTGVHSGHILWHDFSTVPRELSGSSQVLEETHPAHQVGASRPGPRDAQLHPGRPRAVPTQCDVPENSRFDCAPEKAITQEQCEARGCCYIPAKQGLQGAQMGQPWCFFPPSYPSYKLENLSQSEMGYTATLTRTTPSFFPKDILTLRLDVMMETENRLHFTIKDPANRRYEVPLETPHVHSRAPSPLYSVEFSEEPFGVIVRRQLDGRVLLNTTVAPLFFADQFLQLSTSLPSQYITGLAEHLSPLMLSTSWNKITLWNRDLAPTPGANLYGSHPFYLALEDGGSAHGVFLLNSNAMDVVLQPSPALSWRSTGGILDVYIFLGPEPKSVVQQYLDVVGYPFMPPYWGLGFHLCRWGYSSTAITRQVVENMTRAHFPLDVQWNDLDYMDSRRDFTFNKDGFRDFPAMVQELHQGGRRYMMIVDPGISSSGPAGSYRPYDEGLRRGVFITNETGQPLIGKVWPGSTAFPDFTNPEALAWWEDMVAEFHDQVPFDGMWIDMNEPSNFIRGSVDGCPNNELENPPYVPGVVGGTLQAATICASSHQFLSTHYNLHNLYGTTEAIASHRALVKARGTRPFVISRSTFAGHGRYAGHWTGDVWSSWEQLASSVPEILQFNLLGVPLVGADVCGFLGNTSEELCVRWTQLGAFYPFMRNHNSLTSLPQEPYSFSEPAQQAMRKALGLRYALLPHLYTLFHQAHVHGETVARPLFLEFPKDSSTWTVDHQMLWGEALLITPVLQPGKAEVTGYFPLGTWYDLQTVPVEALGSLPPPPAAPREPAIHSEGQWVTLPAPLDTINVHLREGYIIPLQGPGLTTTESRKQPMALAVALTKSGEARGELFWDDGESLEVLERGAYTQVIFEARNNTIVNELVHVTSEGAGLQLGKVTVLGVATAPQQVLSNGRPVSNFTYSPDTKVLDICVELLMGEQFLVSWC

SEQ ID NO: 483 - DNA, 2832 bp, synthetic construct
  misc_feature 1..2832: note = Variant of the Homo Sapiens Lysosomal alpha-glucosidase
  source 1..2832: mol_type = other DNA
atggaatggagctgggtctttctcttcttcctgtcagtaacgactggtgtccactccggacacattctgtggcatgatttttctaccgtgcctagagagctttccggttcaagtcaagtcctcgaagaaacacatccagcccatcaggttggcgcatctaggccgggccctcgggacgctcaactccacccagggagacctagggccgttcccactcagtgcgacgtgccagagaactcacgcttcgattgtgcacctgagaaggctatcacgcaagagcagtgcgaggcccgcggatgttgttacataccggctaaacaggggctgcagggtgcgcagatgggccaaccttggtgcttcttcccaccatcctatccgagttacaagctggagaatctctcccagtctgaaatgggatataccgcaacactgactcggaccaccccctccttctttcccaaagatatcttgactctgagacttgacgtaatgatggagacagaaaacaggctccactttaccattaaggaccctgccaatcgccgatacgaggtgcctctggaaacaccacacgtgcacagtagagctccatcacctctgtattctgtcgagttctccgaagagccgtttggcgttatcgtcaggaggcagctcgacgggcgagtgcttctgaacacgactgtggccccgttgttctttgcggatcagtttctgcaactgtcaacaagtctcccttctcagtacattaccgggcttgcagagcatctgtccccactcatgctgagtacttcatggcaaaaaatcacactgtggaatagagaccttgctcctactccaggagccaacttgtatggttctcaccctttctacttggccctggaagatggcggatcagcgcatggcgtattcctcctgaattccaacgcaatggacgttgttcttcagccatctcctgctttgagttggagatctacaggcgggatactggacgtctacatctttctgggtccagagcctaaatccgtagtgcagcagtatcttgatgtcgtcggatacccgtttatgccaccatattggggcctggggttccacttgtgccgctggggatattcatccaccgccattacacgacaagttgttgagaatatgaccagggcacattttcctctggatgtacagtggaacgacctggactacatggatagtcgccgcgacttcaccttcaataaggatgggttcagagactttcctgctatggtccaagaacttcaccagggaggcaggaggtacatgatgatcgtagatccgggaatttcttcttctggcccagccggttcatacagaccgtatgacgaaggactgcgacgaggcgtctttatcacgaacgagactggtcagcctttgataggcaaggtttggccagggtccaccgctttcccggatttcacaaatcctgaggcactggcctggtgggaagatatggtcgccgagtttcacgaccaggtcccatttgacgggatgtggatcgacatgaacgagccatccaacttcattagaggaagtgtggatggctgtccgaataatgagctggaaaaccctccttacgtaccaggcgttgttggtgggactcttcaagctgcgacgatttgcgcatcctcccatcagttcctgtcaacccactataacttgcacaatctgtacgggacaacagaggctatcgccagtcatagggccctggtaaaagctagaggaacacgccctttcgttatctctcgctcaacttttgcaggccacggtaggtatgccggacattggaccggcgacgtctggagttcttgggaacagctggcttcctccgttccagagatattgcagtttaacctgttgggagtcccacttgtaggtgcagatgtttgtggcttcctggggaacacctcagaagaattgtgcgtaagatggactcaactgggcgccttctacccttttatgcgcaatcacaactcactgacatctttgcctcaagaaccgtactcatttagtgagccagcacagcaggccatgaggaaggctcttggcctgagatatgcacttctgccgcatctgtacacccttttccaccaggctcatgtccatggagagactgttgcacgacctctgttcttggagttcccaaaagactcttccacgtggacagtcgatcaccagatgctgtggggcgaggctctgctgattacacctgtattgcaacctggtaaggccgaagttaccgggtactttccattggggacctggtatgatctgcaaacagtcccggttgaagctcttggaagtcttccacctccacctgctgcaccaagggagcctgcgatccactctgaaggacagtgggtaactttgcctgcaccgctggacaccatcaatgtccatctgcgcgaaggctacatcataccacttcaaggtcctggactgaccactacagagtctagaaaacaaccaatggctcttgctgttgcactgactaaaagcggcgaagcaaggggtgagctgttctgggacgacggagagtcactggaggtactcgaacgaggcgcgtatacgcaggtcatttttgaggctcgcaataatacgatcgttaacgagctggtccacgtcacttcagaaggtgcaggccttcagttgggcaaggtaactgtcctgggagttgctacagcaccgcagcaggtcttgtccaacggacggcccgtaagcaactttacctatagtcctgataccaaagttctggacatctgcgttgctctgctgatgggtgagcagttcctggtatcatggtgc

SEQ ID NO: 484 - protein, 944 aa, synthetic construct
  REGION 1..944: note = Variant of the Homo Sapiens Lysosomal alpha-glucosidase
MEWSWVFLFFLSVTTGVHSGHILWHDFSTVPRELSGSSQVLEETHPAHQVGASRPGPRDAQLHPGRPRAVPTQCDVPENSRFDCAPEKAITQEQCEARGCCYIPAKQGLQGAQMGQPWCFFPPSYPSYKLENLSQSEMGYTATLTRTTPSFFPKDILTLRLDVMMETENRLHFTIKDPANRRYEVPLETPHVHSRAPSPLYSVEFSEEPFGVIVRRQLDGRVLLNTTVAPLFFADQFLQLSTSLPSQYITGLAEHLSPLMLSTSWQKITLWNRDLAPTPGANLYGSHPFYLALEDGGSAHGVFLLNSNAMDVVLQPSPALSWRSTGGILDVYIFLGPEPKSVVQQYLDVVGYPFMPPYWGLGFHLCRWGYSSTAITRQVVENMTRAHFPLDVQWNDLDYMDSRRDFTFNKDGFRDFPAMVQELHQGGRRYMMIVDPGISSSGPAGSYRPYDEGLRRGVFITNETGQPLIGKVWPGSTAFPDFTNPEALAWWEDMVAEFHDQVPFDGMWIDMNEPSNFIRGSVDGCPNNELENPPYVPGVVGGTLQAATICASSHQFLSTHYNLHNLYGTTEAIASHRALVKARGTRPFVISRSTFAGHGRYAGHWTGDVWSSWEQLASSVPEILQFNLLGVPLVGADVCGFLGNTSEELCVRWTQLGAFYPFMRNHNSLTSLPQEPYSFSEPAQQAMRKALGLRYALLPHLYTLFHQAHVHGETVARPLFLEFPKDSSTWTVDHQMLWGEALLITPVLQPGKAEVTGYFPLGTWYDLQTVPVEALGSLPPPPAAPREPAIHSEGQWVTLPAPLDTINVHLREGYIIPLQGPGLTTTESRKQPMALAVALTKSGEARGELFWDDGESLEVLERGAYTQVIFEARNNTIVNELVHVTSEGAGLQLGKVTVLGVATAPQQVLSNGRPVSNFTYSPDTKVLDICVALLMGEQFLVSWC

SEQ ID NO: 485 - DNA, 2832 bp, synthetic construct
  misc_feature 1..2832: note = Variant of the Homo Sapiens Lysosomal alpha-glucosidase
  source 1..2832: mol_type = other DNA
atggaatggagctgggtctttctcttcttcctgtcagtaacgactggtgtccactccggacacattctgtggcatgatttttctaccgtgcctagagagctttccggttcaagtgctgtcctcgaagaaacacatccagcccatcaggttggcgcatctaggccgggccctcgggacgctcaactccacccagggagacctagggccgttcccactcagtgcgacgtgccagagaactcacgcttcgattgtgcacctgagaaggctatcacgcaagagcagtgcgaggcccgcggatgttgttacataccggctaaacaggggctgcagggtgcgcagatgggccaaccttggtgcttcttcccaccatcctatccgagttacaagctggagaatctctcccagtctgaaatgggatataccgcaacactgactcggaccaccccctccttctttcccaaagatatcttgactctgagacttgacgtaatgatggagacagaaaacaggctccactttaccattaaggaccctgccaatcgccgatacgaggtgcctctggaaacaccacacgtgcacagtagagctccatcacctctgtattctgtcgagttctccgaagagccgtttggcgttatcgtcaggaggcagctcgacgggcgagtgcttctgaacacgactgtggccccgttgttctttgcggatcagtttctgcaactgtcaacaagtctcccttctcagtacattaccgggcttgcagagcatctgtccccactcatgctgagtacttcatggaacaaaatcacactgtggaatagagaccttgctcctactccaggagccaacttgtatggttctcaccctttctacttggccctggaagatggcggatcagcgcatggcgtattcctcctgaattccaacgcaatggacgttgttcttcagccatctcctgctttgagttggagatctacaggcgggatactggacgtctacatctttctgggtccagagcctaaatccgtagtgcagcagtatcttgatgtcgtcggatacccgtttatgccaccatattggggcctggggttccacttgtgccgctggggatattcatccaccgccattacacgacaagttgttgagaatatgaccagggcacattttcctctggatgtacagtggaacgacctggactacatggatagtcgccgcgacttcaccttcaataaggatgggttcagagactttcctgctatggtccaagaacttcaccagggaggcaggaggtacatgatgatcgtagatccgggaatttcttcttctggcccagccggttcatacagaccgtatgacgaaggactgcgacgaggcgtctttatcacgaacgagactggtcagcctttgataggcaaggtttggccagggtccaccgctttcccggatttcacaaatcctgaggcactggcctggtgggaagatatggtcgccgagtttcacgaccaggtcccatttgacgggatgtggatcgacatgaacgagccatccaacttcattagaggaagtgtggatggctgtccgaataatgagctggaaaaccctccttacgtaccaggcgttgttggtgggactcttcaagctgcgacgatttgcgcatcctcccatcagttcctgtcaacccactataacttgcacaatctgtacgggacaacagaggctatcgccagtcatagggccctggtaaaagctagaggaacacgccctttcgttatctctcgctcaacttttgcaggccacggtaggtatgccggacattggaccggcgacgtctggagttcttgggaacagctggcttcctccgttccagagatattgcagtttaacctgttgggagtcccacttgtaggtgcagatgtttgtggcttcctggggaacacctcagaagaattgtgcgtaagatggactcaactgggcgccttctacccttttatgcgcaatcacaactcactgacatctttgcctcaagaaccgtactcatttagtgagccagcacagcaggccatgaggaaggctcttggcctgagatatgcacttctgccgcatctgtacacccttttccaccaggctcatgtccatggagagactgttgcacgacctctgttcttggagttcccaaaagactcttccacgtggacagtcgatcaccagatgctgtggggcgaggctctgctgattacacctgtattgcaacctggtaaggccgaagttaccgggtactttccattggggacctggtatgatctgcaaacagtcccggttgaagctcttggaagtcttccacctccacctgctgcaccaagggagcctgcgatccactctgaaggacagtgggtaactttgcctgcaccgctggacaccatcaatgtccatctgcgcgaaggctacatcataccacttcaaggtcctggactgaccactacagagtctagaaaacaaccaatggctcttgctgttgcactgactaaaagcggcgaagcaaggggtgagctgttctgggacgacggagagtcactggaggtactcgaacgaggcgcgtatacgcaggtcatttttgaggctcgcaataatacgatcgttaacgagctggtccacgtcacttcagaaggtgcaggccttcagttgggcaaggtaactgtcctgggagttgctacagcaccgcagcaggtcttgtccaacggacggcccgtaagcaactttacctatagtcctgataccaaagttctggacatctgcgttgctctgctgatgggtgagcagttcctggtatcatggtgc

SEQ ID NO: 486 - protein, 944 aa, synthetic construct
  REGION 1..944: note = Variant of the Homo Sapiens Lysosomal alpha-glucosidase
MEWSWVFLFFLSVTTGVHSGHILWHDFSTVPRELSGSSAVLEETHPAHQVGASRPGPRDAQLHPGRPRAVPTQCDVPENSRFDCAPEKAITQEQCEARGCCYIPAKQGLQGAQMGQPWCFFPPSYPSYKLENLSQSEMGYTATLTRTTPSFFPKDILTLRLDVMMETENRLHFTIKDPANRRYEVPLETPHVHSRAPSPLYSVEFSEEPFGVIVRRQLDGRVLLNTTVAPLFFADQFLQLSTSLPSQYITGLAEHLSPLMLSTSWNKITLWNRDLAPTPGANLYGSHPFYLALEDGGSAHGVFLLNSNAMDVVLQPSPALSWRSTGGILDVYIFLGPEPKSVVQQYLDVVGYPFMPPYWGLGFHLCRWGYSSTAITRQVVENMTRAHFPLDVQWNDLDYMDSRRDFTFNKDGFRDFPAMVQELHQGGRRYMMIVDPGISSSGPAGSYRPYDEGLRRGVFITNETGQPLIGKVWPGSTAFPDFTNPEALAWWEDMVAEFHDQVPFDGMWIDMNEPSNFIRGSVDGCPNNELENPPYVPGVVGGTLQAATICASSHQFLSTHYNLHNLYGTTEAIASHRALVKARGTRPFVISRSTFAGHGRYAGHWTGDVWSSWEQLASSVPEILQFNLLGVPLVGADVCGFLGNTSEELCVRWTQLGAFYPFMRNHNSLTSLPQEPYSFSEPAQQAMRKALGLRYALLPHLYTLFHQAHVHGETVARPLFLEFPKDSSTWTVDHQMLWGEALLITPVLQPGKAEVTGYFPLGTWYDLQTVPVEALGSLPPPPAAPREPAIHSEGQWVTLPAPLDTINVHLREGYIIPLQGPGLTTTESRKQPMALAVALTKSGEARGELFWDDGESLEVLERGAYTQVIFEARNNTIVNELVHVTSEGAGLQLGKVTVLGVATAPQQVLSNGRPVSNFTYSPDTKVLDICVALLMGEQFLVSWC

SEQ ID NO: 487 - DNA, 2832 bp, synthetic construct
  misc_feature 1..2832: note = Variant of the Homo Sapiens Lysosomal alpha-glucosidase
  source 1..2832: mol_type = other DNA
atggaatggagctgggtctttctcttcttcctgtcagtaacgactggtgtccactccggacacattctgacccatgatttttctaccgtgcctagagagctttccggttcaagtcaagtcctcgaagaaacacatccagcccatcaggttggcgcatctaggccgggccctcgggacgctcaactccacccagggagacctagggccgttcccactcagtgcgacgtgccagagaactcacgcttcgattgtgcacctgagaaggctatcacgcaagagcagtgcgaggcccgcggatgttgttacataccggctaaacaggggctgcagggtgcgcagatgggccaaccttggtgcttcttcccaccatcctatccgagttacaagctggagaatctctcccagtctgaaatgggatataccgcaacactgactcggaccaccccctccttctttcccaaagatatcttgactctgagacttgacgtaatgatggagacagaaaacaggctccactttaccattaaggaccctgccaatcgccgatacgaggtgcctctggaaacaccacacgtgcacagtagagctccatcacctctgtattctgtcgagttctccgaagagccgtttggcgttatcgtcaggaggcagctcgacgggcgagtgcttctgaacacgactgtggccccgttgttctttgcggatcagtttctgcaactgtcaacaagtctcccttctcagtacattaccgggcttgcagagcatctgtccccactcatgctgagtacttcatggaacaaaatcacactgtggaatagagaccttgctcctactccaggagccaacttgtatggttctcaccctttctacttggccctggaagatggcggatcagcgcatggcgtattcctcctgaattccaacgcaatggacgttgttcttcagccatctcctgctttgagttggagatctacaggcgggatactggacgtctacatctttctgggtccagagcctaaatccgtagtgcagcagtatcttgatgtcgtcggatacccgtttatgccaccatattggggcctggggttccacttgtgccgctggggatattcatccaccgccattacacgacaagttgttgagaatatgaccagggcacattttcctctggatgtacagtggaacgacctggactacatggatagtcgccgcgacttcaccttcaataaggatgggttcagagactttcctgctatggtccaagaacttcaccagggaggcaggaggtacatgatgatcgtagatccgggaatttcttcttctggcccagccggttcatacagaccgtatgacgaaggactgcgacgaggcgtctttatcacgaacgagactggtcagcctttgataggcaaggtttggccagggtccaccgctttcccggatttcacaaatcctgaggcactggcctggtgggaagatatggtcgccgagtttcacgaccaggtcccatttgacgggatgtggatcgacatgaacgagccatccaacttcattagaggaagtgtggatggctgtccgaataatgagctggaaaaccctccttacgtaccaggcgttgttggtgggactcttcaagctgcgacgatttgcgcatcctcccatcagttcctgtcaacccactataacttgcacaatctgtacgggacaacagaggctatcgccagtcatagggccctggtaaaagctagaggaacacgccctttcgttatctctcgctcaacttttgcaggccacggtaggtatgccggacattggaccggcgacgtctggagttcttgggaacagctggcttcctccgttccagagatattgcagtttaacctgttgggagtcccacttgtaggtgcagatgtttgtggcttcctggggaacacctcagaagaattgtgcgtaagatggactcaactgggcgccttctacccttttatgcgcaatcacaactcactgacatctttgcctcaagaaccgtactcatttagtgagccagcacagcaggccatgaggaaggctcttggcctgagatatgcacttctgccgcatctgtacacccttttccaccaggctcatgtccatggagagactgttgcacgacctctgttcttggagttcccaaaagactcttccacgtggacagtcgatcaccagatgctgtggggcgaggctctgctgattacacctgtattgcaacctggtaaggccgaagttaccgggtactttccattggggacctggtatgatctgcaaacagtcccggttgaagctcttggaagtcttccacctccacctgctgcaccaagggagcctgcgatccactctgaaggacagtgggtaactttgcctgcaccgctggacaccatcaatgtccatctgcgcgaaggctacatcataccacttcaaggtcctggactgaccactacagagtctagaaaacaaccaatggctcttgctgttgcactgactaaaagcggcgaagcaaggggtgagctgttctgggacgacggagagtcactggaggtactcgaacgaggcgcgtatacgcaggtcatttttgaggctcgcaataatacgatcgttaacgagctggtccacgtcacttcagaaggtgcaggccttcagttgggcaaggtaactgtcctgggagttgctacagcaccgcagcaggtcttgtccaacggacggcccgtaagcaactttacctatagtcctgataccaaagttctggacatctgcgttgctctgctgatgggtgagcagttcctggtatcatggtgc

SEQ ID NO: 488 - protein, 944 aa, synthetic construct
  REGION 1..944: note = Variant of the Homo Sapiens Lysosomal alpha-glucosidase
MEWSWVFLFFLSVTTGVHSGHILTHDFSTVPRELSGSSQVLEETHPAHQVGASRPGPRDAQLHPGRPRAVPTQCDVPENSRFDCAPEKAITQEQCEARGCCYIPAKQGLQGAQMGQPWCFFPPSYPSYKLENLSQSEMGYTATLTRTTPSFFPKDILTLRLDVMMETENRLHFTIKDPANRRYEVPLETPHVHSRAPSPLYSVEFSEEPFGVIVRRQLDGRVLLNTTVAPLFFADQFLQLSTSLPSQYITGLAEHLSPLMLSTSWNKITLWNRDLAPTPGANLYGSHPFYLALEDGGSAHGVFLLNSNAMDVVLQPSPALSWRSTGGILDVYIFLGPEPKSVVQQYLDVVGYPFMPPYWGLGFHLCRWGYSSTAITRQVVENMTRAHFPLDVQWNDLDYMDSRRDFTFNKDGFRDFPAMVQELHQGGRRYMMIVDPGISSSGPAGSYRPYDEGLRRGVFITNETGQPLIGKVWPGSTAFPDFTNPEALAWWEDMVAEFHDQVPFDGMWIDMNEPSNFIRGSVDGCPNNELENPPYVPGVVGGTLQAATICASSHQFLSTHYNLHNLYGTTEAIASHRALVKARGTRPFVISRSTFAGHGRYAGHWTGDVWSSWEQLASSVPEILQFNLLGVPLVGADVCGFLGNTSEELCVRWTQLGAFYPFMRNHNSLTSLPQEPYSFSEPAQQAMRKALGLRYALLPHLYTLFHQAHVHGETVARPLFLEFPKDSSTWTVDHQMLWGEALLITPVLQPGKAEVTGYFPLGTWYDLQTVPVEALGSLPPPPAAPREPAIHSEGQWVTLPAPLDTINVHLREGYIIPLQGPGLTTTESRKQPMALAVALTKSGEARGELFWDDGESLEVLERGAYTQVIFEARNNTIVNELVHVTSEGAGLQLGKVTVLGVATAPQQVLSNGRPVSNFTYSPDTKVLDICVALLMGEQFLVSWC

SEQ ID NO: 489 - DNA, 2832 bp, synthetic construct
  misc_feature 1..2832: note = Variant of the Homo Sapiens Lysosomal alpha-glucosidase
  source 1..2832: mol_type = other DNA
atggaatggagctgggtctttctcttcttcctgtcagtaacgactggtgtccactccggacacattctgtggcatgatttttctaccgtgcctagagagctttccggttcaagtcaagtcctcgaagaaacacatccagcccatcaggttggcgcatctaggccgggccctcgggacgctcaactccacccagggagacctagggccgttcccactcagtgcgacgtgccagagaactcacgcttcgattgtgcacctgagaaggctatcacgcaagagcagtgcgaggcccgcggatgttgttacataccggctaaacaggggctgcagggtgcgcagatgggccaaccttggtgcttcttcccaccatcctatccgagttacaagctggagaatctctcccagtctgaaatgggatataccgcaacactgactcggaccaccccctccttctttcccaaagatatcttgactctgagacttgacgtaatgatggagacagaaaacaggctccactttaccattaaggaccctgccaatcgccgatacgaggtgcctctggaaacaccacacgtgcacagtagagctccatcacctctgtattctgtcgagttctccgaagagccgtttggcgttatcgtcaggaggcagctcgacgggcgagtgcttctgaacacgactgtggccccgttgttctttgcggatcagtttctgcaactgtcaacaagtctcccttctcagtacattaccgggcttgcagagcatctgtccccactcatgctgagtacttcatggaacaaaatcacactgtggaatagagaccttgctcctactccaggagccaacttgtatggttctcaccctttctacttggccctggaagatggcggatcagcgcatggcgtattcctcctgaattccaacgcaatggacgttgttcttcagccatctcctgctttgagttggagatctacaggcgggatactggacgtctacatctttctgggtccagagcctaaatccgtagtgcagcagtatcttgatgtcgtcggatacccgtttatgccaccatattggggcctggggttccacttgtgccgctggggatattcatccaccgccattacacgacaagttgttgagaatatgaccagggcacattttcctctggatgtacagtggaacgacctggactacatggatagtcgccgcgacttcaccttcaataaggatgggttcagagactttcctgctatggtccaagaacttcaccagggaggcaggaggtacatgatgatcgtagatccgggaatttcttcttctggcccagccggttcatacagaccgtatgacgaaggactgcgacgaggcgtctttatcacgaacgagactggtcagcctttgataggcaaggtttggccagggtccaccgctttcccggatttcacaaatcctgaggcactggcctggtgggaagatatggtcgccgagtttcacgaccaggtcccatttgacgggatgtggatcgacatgaacgagccatccaacttcattagaggaagtgtggatggctgtccgaataatgagctggaaaaccctccttacgtaccaggcgttgttggtgggactcttcaagctgcgacgatttgcgcatcctcccatcagttcctgtcaacccactataacttgcacaatctgtacgggacaacagaggctatcgccagtcatagggccctggtaaaagctagaggaacacgccctttcgttatctctcgctcaacttttgcaggccacggtaggtatgccggacattggaccggcgacgtctggagttcttgggaacagctggcttcctccgttccagagatattgcagtttaacctgttgggagtcccacttgtaggtgcagatgtttgtggcttcctggggaacacctcagaagaattgtgcgtaagatggactcaactgggcgccttctacccttttatgcgcaatcacaactcactgacatctttgcctcaagaaccgtactcatttagtgagccagcacagcaggccatgaggaaggctcttggcctgagatatgcacttctgccgcatctgtacacccttttccaccaggctcatgtccatggagagactgttgcacgacctctgttcttggagttcccaaaagactcttccacgtggacagtcgatcaccagatgctgtggggcgaggctctgctgattacacctgtattgcaacctggtaaggccgaagttaccgggtactttccattggggacctggtatgatctgcaaacagtcccggttgaagctcttggaagtcttccacctccacctgctgcaccaagggagcctgcgatccactctgaaggacagtgggtaactttgcctgcaccgctggacaccatcaatgtccatctgcgcgaaggctacatcataccacttcaaggtcctggactgaccactacagagtctagaaaacaaccaatggctcttgctgttgcactgactaaaagcggcgaagcaaggggtgagctgttctgggacgacggagagtcactggaggtactcgaacgaggcgcgtatacgcaggtcatttttaccgctcgcaataatacgatcgttaacgagctggtccacgtcacttcagaaggtgcaggccttcagttgggcaaggtaactgtcctgggagttgctacagcaccgcagcaggtcttgtccaacggacggcccgtaagcaactttacctatagtcctgataccaaagttctggacatctgcgttgctctgctgatgggtgagcagttcctggtatcatggtgc

SEQ ID NO: 490 - protein, 944 aa, synthetic construct
  REGION 1..944: note = Variant of the Homo Sapiens Lysosomal alpha-glucosidase
MEWSWVFLFFLSVTTGVHSGHILWHDFSTVPRELSGSSQVLEETHPAHQVGASRPGPRDAQLHPGRPRAVPTQCDVPENSRFDCAPEKAITQEQCEARGCCYIPAKQGLQGAQMGQPWCFFPPSYPSYKLENLSQSEMGYTATLTRTTPSFFPKDILTLRLDVMMETENRLHFTIKDPANRRYEVPLETPHVHSRAPSPLYSVEFSEEPFGVIVRRQLDGRVLLNTTVAPLFFADQFLQLSTSLPSQYITGLAEHLSPLMLSTSWNKITLWNRDLAPTPGANLYGSHPFYLALEDGGSAHGVFLLNSNAMDVVLQPSPALSWRSTGGILDVYIFLGPEPKSVVQQYLDVVGYPFMPPYWGLGFHLCRWGYSSTAITRQVVENMTRAHFPLDVQWNDLDYMDSRRDFTFNKDGFRDFPAMVQELHQGGRRYMMIVDPGISSSGPAGSYRPYDEGLRRGVFITNETGQPLIGKVWPGSTAFPDFTNPEALAWWEDMVAEFHDQVPFDGMWIDMNEPSNFIRGSVDGCPNNELENPPYVPGVVGGTLQAATICASSHQFLSTHYNLHNLYGTTEAIASHRALVKARGTRPFVISRSTFAGHGRYAGHWTGDVWSSWEQLASSVPEILQFNLLGVPLVGADVCGFLGNTSEELCVRWTQLGAFYPFMRNHNSLTSLPQEPYSFSEPAQQAMRKALGLRYALLPHLYTLFHQAHVHGETVARPLFLEFPKDSSTWTVDHQMLWGEALLITPVLQPGKAEVTGYFPLGTWYDLQTVPVEALGSLPPPPAAPREPAIHSEGQWVTLPAPLDTINVHLREGYIIPLQGPGLTTTESRKQPMALAVALTKSGEARGELFWDDGESLEVLERGAYTQVIFTARNNTIVNELVHVTSEGAGLQLGKVTVLGVATAPQQVLSNGRPVSNFTYSPDTKVLDICVALLMGEQFLVSWC

SEQ ID NO: 491 - DNA, 2832 bp, synthetic construct
  misc_feature 1..2832: note = Variant of the Homo Sapiens Lysosomal alpha-glucosidase
  source 1..2832: mol_type = other DNA
atggaatggagctgggtctttctcttcttcctgtcagtaacgactggtgtccactccggacacattctgtggcatgatttttctaccgtgcctagagagctttccggttcaagtcaagtcctcgaagaaacacatccagcccatcaggttggcgcatctaggccgggccctcgggacgctcaactccacccagggagacctagggccgttcccactcagtgcgacgtgccagagaactcacgcttcgattgtgcacctgagaaggctatcacgcaagagcagtgcgaggcccgcggatgttgttacataccggctaaacaggggctgcagggtgcgcagatgggccaaccttggtgcttcttcccaccatcctatccgagttacaagctggagaatctctcccagtctgaaatgggatataccgcaacactgactcggaccaccccctccttctttcccaaagatatcttgactctgagacttgacgtaatgatggagacagaaaacaggctccactttaccattaaggaccctgccaatcgccgatacgaggtgcctctggaaacaccacacgtgcacagtagagctccatcacctctgtattctgtcgagttctccgaagagccgtttggcgttatcgtcaggaggcagctcgacgggcgagtgcttctgaacacgactgtggccccgttgttctttgcggatcagtttctgcaactgtcaacaagtctcccttctcagtacattaccgggcttgcagagcatctgtccccactcatgctgagtacttcatggaacaaaatcacactgtggaatagagaccttgctcctactccaggagccaacttgtatggttctcaccctttctacttggccctggaagatggcggatcagcgcatggcgtattcctcctgaattccaacgcaatggacgttgttcttcagccatctcctgctttgagttggagatctacaggcgggatactggacgtctacatctttctgggtccagagcctaaatccgtagtgcagcagtatcttgatgtcgtcggatacccgtttatgccaccatattggggcctggggttccacttgtgccgctggggatattcatccaccgccattacacgacaagttgttgagaatatgaccagggcacattttcctctggatgtacagtggaacgacctggactacatggatagtcgccgcgacttcaccttcaataaggatgggttcagagactttcctgctatggtccaagaacttcaccagggaggcaggaggtacatgatgatcgtagatccgggaatttcttcttctggcccagccggttcatacagaccgtatgacgaaggactgcgacgaggcgtctttatcacgaacgagactggtcagcctttgataggcaaggtttggccagggtccaccgctttcccggatttcacaaatcctgaggcactggcctggtgggaagatatggtcgccgagtttcacgaccaggtcccatttgacgggatgtggatcgacatgaacgagccatccaacttcattagaggaagtgtggatggctgtccgaataatgagctggaaaaccctccttacgtaccaggcgttgttggtgggactcttcaagctgcgacgatttgcgcatcctcccatcagttcctgtcaacccactataacttgcacaatctgtacgggacaacagaggctatcgccagtcatagggccctggtaaaagctagaggaacacgccctttcgttatctctcgctcaacttttgcaggccacggtaggtatgccggacattggaccggcgacgtctggagttcttgggaacagctggcttcctccgttccagagatattgcagtttaacctgttgggagtcccacttgtaggtgcagatgtttgtggcttcctggggaacacctcagaagaattgtgcgtaagatggactcaactgggcgccttctacccttttatgcgcaatcacaactcactgacatctttgcctcaagaaccgtactcatttagtgagccagcacagcaggccatgaggaaggctcttggcctgagatatgcacttctgccgcatctgtacacccttttccaccaggctcatgtccatggagagactgttgcacgacctctgttcttggagttcccaaaagactcttccacgtggacagtcgatcaccagatgctgtggggcgaggctctgctgattacacctgtattgcaacctggtaaggccgaagttaccgggtactttccattggggacctggtatgatctgcaaacagtcccggttgaagctcttggaagtcttccacctccacctgctgcaccaagggagcctgcgatccactctgaaggacagtgggtaactttgcctgcaccgctggacaccatcaatgtccatctgcgcgaaggctacatcataccacttcaaggtcctggactgaccactacagagtctagaaaacaaccaatggctcttgctgttgcactgactaaaatgggcgaagcaaggggtgagctgttctgggacgacggagagtcactggaggtactcgaacgaggcgcgtatacgcaggtcatttttgaggctcgcaataatacgatcgttaacgagctggtccacgtcacttcagaaggtgcaggccttcagttgggcaaggtaactgtcctgggagttgctacagcaccgcagcaggtcttgtccaacggacggcccgtaagcaactttacctatagtcctgataccaaagttctggacatctgcgttgctctgctgatgggtgagcagttcctggtatcatggtgc

SEQ ID NO: 492 - protein, 944 aa, synthetic construct
  REGION 1..944: note = Variant of the Homo Sapiens Lysosomal alpha-glucosidase
MEWSWVFLFFLSVTTGVHSGHILWHDFSTVPRELSGSSQVLEETHPAHQVGASRPGPRDAQLHPGRPRAVPTQCDVPENSRFDCAPEKAITQEQCEARGCCYIPAKQGLQGAQMGQPWCFFPPSYPSYKLENLSQSEMGYTATLTRTTPSFFPKDILTLRLDVMMETENRLHFTIKDPANRRYEVPLETPHVHSRAPSPLYSVEFSEEPFGVIVRRQLDGRVLLNTTVAPLFFADQFLQLSTSLPSQYITGLAEHLSPLMLSTSWNKITLWNRDLAPTPGANLYGSHPFYLALEDGGSAHGVFLLNSNAMDVVLQPSPALSWRSTGGILDVYIFLGPEPKSVVQQYLDVVGYPFMPPYWGLGFHLCRWGYSSTAITRQVVENMTRAHFPLDVQWNDLDYMDSRRDFTFNKDGFRDFPAMVQELHQGGRRYMMIVDPGISSSGPAGSYRPYDEGLRRGVFITNETGQPLIGKVWPGSTAFPDFTNPEALAWWEDMVAEFHDQVPFDGMWIDMNEPSNFIRGSVDGCPNNELENPPYVPGVVGGTLQAATICASSHQFLSTHYNLHNLYGTTEAIASHRALVKARGTRPFVISRSTFAGHGRYAGHWTGDVWSSWEQLASSVPEILQFNLLGVPLVGADVCGFLGNTSEELCVRWTQLGAFYPFMRNHNSLTSLPQEPYSFSEPAQQAMRKALGLRYALLPHLYTLFHQAHVHGETVARPLFLEFPKDSSTWTVDHQMLWGEALLITPVLQPGKAEVTGYFPLGTWYDLQTVPVEALGSLPPPPAAPREPAIHSEGQWVTLPAPLDTINVHLREGYIIPLQGPGLTTTESRKQPMALAVALTKMGEARGELFWDDGESLEVLERGAYTQVIFEARNNTIVNELVHVTSEGAGLQLGKVTVLGVATAPQQVLSNGRPVSNFTYSPDTKVLDICVALLMGEQFLVSWC

SEQ ID NO: 493 - DNA, 2832 bp, synthetic construct
  misc_feature 1..2832: note = Variant of the Homo Sapiens Lysosomal alpha-glucosidase
  source 1..2832: mol_type = other DNA
atggaatggagctgggtctttctcttcttcctgtcagtaacgactggtgtccactccggacacattctgtggcatgatttttctaccgtgcctagagagctttccggttcaagtcaagtcctcgaagaaacacatccagcccatcaggttggcgcatctaggccgggccctcgggacgctcaactccacccagggagacctagggccgttcccactcagtgcgacgtgccagagaactcacgcttcgattgtgcacctgagaaggctatcacgcaagagcagtgcgaggcccgcggatgttgttacataccggctaaacaggggctgcagggtgcgcagatgggccaaccttggtgcttcttcccaccatcctatccgagttacaagctggagaatctctcccagtctgaaatgggatataccgcaacactgactcggaccaccccctccttctttcccaaagatatcttgactctgagacttgacgtaatgatggagacagaaaacaggctccactttaccattaaggaccctgccaatcgccgatacgaggtgcctctggaaacaccacacgtgcacagtagagctccatcacctctgtattctgtcgagttctccgaagagccgtttggcgttatcgtcaggaggcagctcgacgggcgagtgcttctgaacacgactgtggccccgttgttctttgcggatcagtttctgcaactgtcaacaagtctcccttctcagtacattaccgggcttgcagagcatctgtccccactcatgctgagtacttcatggaacaaaatcacactgtggaatagagaccttgctcctactccaggagccaacttgtatggttctcaccctttctacttggccctggaagatggcggatcagcgcatggcgtattcctcctgaattccaacgcaatggacgttgttcttcagccatctcctgctttgagttggagatctacaggcgggatactggacgtctacatctttctgggtccagagcctaaatccgtagtgcagcagtatcttgatgtcgtcggatacccgtttatgccaccatattggggcctggggttccacttgtgccgctggggatattcatccaccgccattacacgacaagttgttgagaatatgaccagggcacattttcctctggatgtacagtggaacgacctggactacatggatagtcgccgcgacttcaccttcaataaggatgggttcagagactttcctgctatggtccaagaacttcaccagggaggcaggaggtacatgatgatcgtagatccgggaatttcttcttctggcccagccggttcatacagaccgtatgacgaaggactgcgacgaggcgtctttatcacgaacgagactggtcagcctttgataggcaaggtttggccagggtccaccgctttcccggatttcacaaatcctgaggcactggcctggtgggaagatatggtcgccgagtttcacgaccaggtcccatttgacgggatgtggatcgacatgaacgagccatccaacttcattagaggaagtgtggatggctgtccgaataatgagctggaaaaccctccttacgtaccaggcgttgttggtgggactcttcaagctgcgacgatttgcgcatcctcccatcagttcctgtcaacccactataacttgcacaatctgtacgggacaacagaggctatcgccagtcatagggccctggtaaaagctagaggaacacgccctttcgttatctctcgctcaacttttgcaggccacggtaggtatgccggacattggaccggcgacgtctggagttcttgggaacagctggcttcctccgttccagagatattgcagtttaacctgttgggagtcccacttgtaggtgcagatgtttgtggcttcctggggaacacctcagaagaattgtgcgtaagatggactcaactgggcgccttctacccttttatgcgcaatcacaactcactgacatctttgcctcaagaaccgtactcatttagtgagccagcacagcaggccatgaggaaggctcttggcctgagatatgcacttctgccgcatctgtacacccttttccaccaggctcatgtcaccggagagactgttgcacgacctctgttcttggagttcccaaaagactcttccacgtggacagtcgatcaccagatgctgtggggcgaggctctgctgattacacctgtattgcaacctggtaaggccgaagttaccgggtactttccattggggacctggtatgatctgcaaacagtcccggttgaagctcttggaagtcttccacctccacctgctgcaccaagggagcctgcgatccactctgaaggacagtgggtaactttgcctgcaccgctggacaccatcaatgtccatctgcgcgaaggctacatcataccacttcaaggtcctggactgaccactacagagtctagaaaacaaccaatggctcttgctgttgcactgactaaaagcggcgaagcaaggggtgagctgttctgggacgacggagagtcactggaggtactcgaacgaggcgcgtatacgcaggtcatttttgaggctcgcaataatacgatcgttaacgagctggtccacgtcacttcagaaggtgcaggccttcagttgggcaaggtaactgtcctgggagttgctacagcaccgcagcaggtcttgtccaacggacggcccgtaagcaactttacctatagtcctgataccaaagttctggacatctgcgttgctctgctgatgggtgagcagttcctggtatcatggtgc

SEQ ID NO: 494 - protein, 944 aa, synthetic construct
  REGION 1..944: note = Variant of the Homo Sapiens Lysosomal alpha-glucosidase
MEWSWVFLFFLSVTTGVHSGHILWHDFSTVPRELSGSSQVLEETHPAHQVGASRPGPRDAQLHPGRPRAVPTQCDVPENSRFDCAPEKAITQEQCEARGCCYIPAKQGLQGAQMGQPWCFFPPSYPSYKLENLSQSEMGYTATLTRTTPSFFPKDILTLRLDVMMETENRLHFTIKDPANRRYEVPLETPHVHSRAPSPLYSVEFSEEPFGVIVRRQLDGRVLLNTTVAPLFFADQFLQLSTSLPSQYITGLAEHLSPLMLSTSWNKITLWNRDLAPTPGANLYGSHPFYLALEDGGSAHGVFLLNSNAMDVVLQPSPALSWRSTGGILDVYIFLGPEPKSVVQQYLDVVGYPFMPPYWGLGFHLCRWGYSSTAITRQVVENMTRAHFPLDVQWNDLDYMDSRRDFTFNKDGFRDFPAMVQELHQGGRRYMMIVDPGISSSGPAGSYRPYDEGLRRGVFITNETGQPLIGKVWPGSTAFPDFTNPEALAWWEDMVAEFHDQVPFDGMWIDMNEPSNFIRGSVDGCPNNELENPPYVPGVVGGTLQAATICASSHQFLSTHYNLHNLYGTTEAIASHRALVKARGTRPFVISRSTFAGHGRYAGHWTGDVWSSWEQLASSVPEILQFNLLGVPLVGADVCGFLGNTSEELCVRWTQLGAFYPFMRNHNSLTSLPQEPYSFSEPAQQAMRKALGLRYALLPHLYTLFHQAHVTGETVARPLFLEFPKDSSTWTVDHQMLWGEALLITPVLQPGKAEVTGYFPLGTWYDLQTVPVEALGSLPPPPAAPREPAIHSEGQWVTLPAPLDTINVHLREGYIIPLQGPGLTTTESRKQPMALAVALTKSGEARGELFWDDGESLEVLERGAYTQVIFEARNNTIVNELVHVTSEGAGLQLGKVTVLGVATAPQQVLSNGRPVSNFTYSPDTKVLDICVALLMGEQFLVSWC

SEQ ID NO: 495 - DNA, 2832 bp, synthetic construct
  misc_feature 1..2832: note = Variant of the Homo Sapiens Lysosomal alpha-glucosidase
  source 1..2832: mol_type = other DNA
atggaatggagctgggtctttctcttcttcctgtcagtaacgactggtgtccactccggacacattctgtggcatgatttttctaccgtgcctagagagctttccggttcaagtcaagtcctcgaagaaacacatccagcccatcaggttggcgcatctaggccgggccctcgggacgctcaactccacccagggagacctagggccgttcccactcagtgcgacgtgccagagaactcacgcttcgattgtgcacctgagaaggctatcacgcaagagcagtgcgaggcccgcggatgttgttacataccggctaaacaggggctgcagggtgcgcagatgggccaaccttggtgcttcttcccaccatcctatccgagttacaagctggagaatctctcccagtctgaaatgggatataccgcaacactgactcggaccaccccctccttctttcccaaagatatcttgactctgagacttgacgtaatgatggagacagaaaacaggctccactttaccattaaggaccctgccaatcgccgatacgaggtgcctctggaaacaccacacgtgcacagtagagctccatcacctctgtattctgtcgagttctccgaagagccgtttggcgttatcgtcaggaggcagctcgacgggcgagtgcttctgaacacgactgtggccccgttgttctttgcggatcagtttctgcaactgtcaacaagtctcccttctcagtacattaccgggcttgcagagcatctgtccccactcatgctgagtacttcatggaagaaaatcacactgtggaatagagaccttgctcctactccaggagccaacttgtatggttctcaccctttctacttggccctggaagatggcggatcagcgcatggcgtattcctcctgaattccaacgcaatggacgttgttcttcagccatctcctgctttgagttggagatctacaggcgggatactggacgtctacatctttctgggtccagagcctaaatccgtagtgcagcagtatcttgatgtcgtcggatacccgtttatgccaccatattggggcctggggttccacttgtgccgctggggatattcatccaccgccattacacgacaagttgttgagaatatgaccagggcacattttcctctggatgtacagtggaacgacctggactacatggatagtcgccgcgacttcaccttcaataaggatgggttcagagactttcctgctatggtccaagaacttcaccagggaggcaggaggtacatgatgatcgtagatccgggaatttcttcttctggcccagccggttcatacagaccgtatgacgaaggactgcgacgaggcgtctttatcacgaacgagactggtcagcctttgataggcaaggtttggccagggtccaccgctttcccggatttcacaaatcctgaggcactggcctggtgggaagatatggtcgccgagtttcacgaccaggtcccatttgacgggatgtggatcgacatgaacgagccatccaacttcattagaggaagtgtggatggctgtccgaataatgagctggaaaaccctccttacgtaccaggcgttgttggtgggactcttcaagctgcgacgatttgcgcatcctcccatcagttcctgtcaacccactataacttgcacaatctgtacgggacaacagaggctatcgccagtcatagggccctggtaaaagctagaggaacacgccctttcgttatctctcgctcaacttttgcaggccacggtaggtatgccggacattggaccggcgacgtctggagttcttgggaacagctggcttcctccgttccagagatattgcagtttaacctgttgggagtcccacttgtaggtgcagatgtttgtggcttcctggggaacacctcagaagaattgtgcgtaagatggactcaactgggcgccttctacccttttatgcgcaatcacaactcactgacatctttgcctcaagaaccgtactcatttagtgagccagcacagcaggccatgaggaaggctcttggcctgagatatgcacttctgccgcatctgtacacccttttccaccaggctcatgtccatggagagactgttgcacgacctctgttcttggagttcccaaaagactcttccacgtggacagtcgatcaccagatgctgtggggcgaggctctgctgattacacctgtattgcaacctggtaaggccgaagttaccgggtactttccattggggacctggtatgatctgcaaacagtcccggttgaagctcttggaagtcttccacctccacctgctgcaccaagggagcctgcgatccactctgaaggacagtgggtaactttgcctgcaccgctggacaccatcaatgtccatctgcgcgaaggctacatcataccacttcaaggtcctggactgaccactacagagtctagaaaacaaccaatggctcttgctgttgcactgactaaaagcggcgaagcaaggggtgagctgttctgggacgacggagagtcactggaggtactcgaacgaggcgcgtatacgcaggtcatttttgaggctcgcaataatacgatcgttaacgagctggtccacgtcacttcagaaggtgcaggccttcagttgggcaaggtaactgtcctgggagttgctacagcaccgcagcaggtcttgtccaacggacggcccgtaagcaactttacctatagtcctgataccaaagttctggacatctgcgttgctctgctgatgggtgagcagttcctggtatcatggtgc

SEQ ID NO: 496 - protein, 944 aa, synthetic construct
  REGION 1..944: note = Variant of the Homo Sapiens Lysosomal alpha-glucosidase
MEWSWVFLFFLSVTTGVHSGHILWHDFSTVPRELSGSSQVLEETHPAHQVGASRPGPRDAQLHPGRPRAVPTQCDVPENSRFDCAPEKAITQEQCEARGCCYIPAKQGLQGAQMGQPWCFFPPSYPSYKLENLSQSEMGYTATLTRTTPSFFPKDILTLRLDVMMETENRLHFTIKDPANRRYEVPLETPHVHSRAPSPLYSVEFSEEPFGVIVRRQLDGRVLLNTTVAPLFFADQFLQLSTSLPSQYITGLAEHLSPLMLSTSWKKITLWNRDLAPTPGANLYGSHPFYLALEDGGSAHGVFLLNSNAMDVVLQPSPALSWRSTGGILDVYIFLGPEPKSVVQQYLDVVGYPFMPPYWGLGFHLCRWGYSSTAITRQVVENMTRAHFPLDVQWNDLDYMDSRRDFTFNKDGFRDFPAMVQELHQGGRRYMMIVDPGISSSGPAGSYRPYDEGLRRGVFITNETGQPLIGKVWPGSTAFPDFTNPEALAWWEDMVAEFHDQVPFDGMWIDMNEPSNFIRGSVDGCPNNELENPPYVPGVVGGTLQAATICASSHQFLSTHYNLHNLYGTTEAIASHRALVKARGTRPFVISRSTFAGHGRYAGHWTGDVWSSWEQLASSVPEILQFNLLGVPLVGADVCGFLGNTSEELCVRWTQLGAFYPFMRNHNSLTSLPQEPYSFSEPAQQAMRKALGLRYALLPHLYTLFHQAHVHGETVARPLFLEFPKDSSTWTVDHQMLWGEALLITPVLQPGKAEVTGYFPLGTWYDLQTVPVEALGSLPPPPAAPREPAIHSEGQWVTLPAPLDTINVHLREGYIIPLQGPGLTTTESRKQPMALAVALTKSGEARGELFWDDGESLEVLERGAYTQVIFEARNNTIVNELVHVTSEGAGLQLGKVTVLGVATAPQQVLSNGRPVSNFTYSPDTKVLDICVALLMGEQFLVSWC

SEQ ID NO: 497 - DNA, 2832 bp, synthetic construct
  misc_feature 1..2832: note = Variant of the Homo Sapiens Lysosomal alpha-glucosidase
  source 1..2832: mol_type = other DNA
atggaatggagctgggtctttctcttcttcctgtcagtaacgactggtgtccactccggacacattctgtggcatgatttttctaccgtgcctagagagctttccggttcaagtcaagtcctcgaagaaacacatccagcccatcaggttggcgcatctaggccgggccctcgggacgctcaactccacccagggagacctagggccgttcccactcagtgcgacgtgccagagaactcacgcttcgattgtgcacctgagaaggctatcacgcaagagcagtgcgaggcccgcggatgttgttacataccggctaaacaggggctgcagggtgcgcagatgggccaaccttggtgcttcttcccaccatcctatccgagttacaagctggagaatctctcccagtctgaaatgggatataccgcaacactgactcggaccaccccctccttctttcccaaagatatcttgactctgagacttgacgtaatgatggagacagaaaacaggctccactttaccattaaggaccctgccaatcgccgatacgaggtgcctctggaaacaccacacgtgcacagtagagctccatcacctctgtattctgtcgagttctccgaagagccgtttggcgttatcgtcaggaggcagctcgacgggcgagtgcttctgaacacgactgtggccccgttgttctttgcggatcagtttctgcaactgtcaacaagtctcccttctcagtacattaccgggcttgcagagcatctgtccccactcatgctgagtacttcatggaacaaaatcacactgtggaatagagaccttgctcctactccaggagccaacttgtatggttctcaccctttctacttggccctggaagatggcggatcagcgcatggcgtattcctcctgaattccaacgcaatggacgttgttcttcagccatctcctgctttgagttggagatctacaggcgggatactggacgtctacatctttctgggtccagagcctaaatccgtagtgcagcagtatcttgatgtcgtcggatacccgtttatgccaccatattggggcctggggttccacttgtgccgctggggatattcatccaccgccattacacgacaagttgttgagaatatgaccagggcacattttcctctggatgtacagtggaacgacctggactacatggatagtcgccgcgacttcaccttcaataaggatgggttcagagactttcctgctatggtccaagaacttcaccagggaggcaggaggtacatgatgatcgtagatccgggaatttcttcttctggcccagccggttcatacagaccgtatgacgaaggactgcgacgaggcgtctttatcacgaacgagactggtcagcctttgataggcaaggtttggccagggtccaccgctttcccggatttcacaaatccttttgcactggcctggtgggaagatatggtcgccgagtttcacgaccaggtcccatttgacgggatgtggatcgacatgaacgagccatccaacttcattagaggaagtgtggatggctgtccgaataatgagctggaaaaccctccttacgtaccaggcgttgttggtgggactcttcaagctgcgacgatttgcgcatcctcccatcagttcctgtcaacccactataacttgcacaatctgtacgggacaacagaggctatcgccagtcatagggccctggtaaaagctagaggaacacgccctttcgttatctctcgctcaacttttgcaggccacggtaggtatgccggacattggaccggcgacgtctggagttcttgggaacagctggcttcctccgttccagagatattgcagtttaacctgttgggagtcccacttgtaggtgcagatgtttgtggcttcctggggaacacctcagaagaattgtgcgtaagatggactcaactgggcgccttctacccttttatgcgcaatcacaactcactgacatctttgcctcaagaaccgtactcatttagtgagccagcacagcaggccatgaggaaggctcttggcctgagatatgcacttctgccgcatctgtacacccttttccaccaggctcatgtccatggagagactgttgcacgacctctgttcttggagttcccaaaagactcttccacgtggacagtcgatcaccagatgctgtggggcgaggctctgctgattacacctgtattgcaacctggtaaggccgaagttaccgggtactttccattggggacctggtatgatctgcaaacagtcccggttgaagctcttggaagtcttccacctccacctgctgcaccaagggagcctgcgatccactctgaaggacagtgggtaactttgcctgcaccgctggacaccatcaatgtccatctgcgcgaaggctacatcataccacttcaaggtcctggactgaccactacagagtctagaaaacaaccaatggctcttgctgttgcactgactaaaagcggcgaagcaaggggtgagctgttctgggacgacggagagtcactggaggtactcgaacgaggcgcgtatacgcaggtcatttttgaggctcgcaataatacgatcgttaacgagctggtccacgtcacttcagaaggtgcaggccttcagttgggcaaggtaactgtcctgggagttgctacagcaccgcagcaggtcttgtccaacggacggcccgtaagcaactttacctatagtcctgataccaaagttctggacatctgcgttgctctgctgatgggtgagcagttcctggtatcatggtgc

SEQ ID NO: 498 - protein, 944 aa, synthetic construct
  REGION 1..944: note = Variant of the Homo Sapiens Lysosomal alpha-glucosidase
MEWSWVFLFFLSVTTGVHSGHILWHDFSTVPRELSGSSQVLEETHPAHQVGASRPGPRDAQLHPGRPRAVPTQCDVPENSRFDCAPEKAITQEQCEARGCCYIPAKQGLQGAQMGQPWCFFPPSYPSYKLENLSQSEMGYTATLTRTTPSFFPKDILTLRLDVMMETENRLHFTIKDPANRRYEVPLETPHVHSRAPSPLYSVEFSEEPFGVIVRRQLDGRVLLNTTVAPLFFADQFLQLSTSLPSQYITGLAEHLSPLMLSTSWNKITLWNRDLAPTPGANLYGSHPFYLALEDGGSAHGVFLLNSNAMDVVLQPSPALSWRSTGGILDVYIFLGPEPKSVVQQYLDVVGYPFMPPYWGLGFHLCRWGYSSTAITRQVVENMTRAHFPLDVQWNDLDYMDSRRDFTFNKDGFRDFPAMVQELHQGGRRYMMIVDPGISSSGPAGSYRPYDEGLRRGVFITNETGQPLIGKVWPGSTAFPDFTNPFALAWWEDMVAEFHDQVPFDGMWIDMNEPSNFIRGSVDGCPNNELENPPYVPGVVGGTLQAATICASSHQFLSTHYNLHNLYGTTEAIASHRALVKARGTRPFVISRSTFAGHGRYAGHWTGDVWSSWEQLASSVPEILQFNLLGVPLVGADVCGFLGNTSEELCVRWTQLGAFYPFMRNHNSLTSLPQEPYSFSEPAQQAMRKALGLRYALLPHLYTLFHQAHVHGETVARPLFLEFPKDSSTWTVDHQMLWGEALLITPVLQPGKAEVTGYFPLGTWYDLQTVPVEALGSLPPPPAAPREPAIHSEGQWVTLPAPLDTINVHLREGYIIPLQGPGLTTTESRKQPMALAVALTKSGEARGELFWDDGESLEVLERGAYTQVIFEARNNTIVNELVHVTSEGAGLQLGKVTVLGVATAPQQVLSNGRPVSNFTYSPDTKVLDICVALLMGEQFLVSWC

SEQ ID NO: 499 - DNA, 2832 bp, synthetic construct
  misc_feature 1..2832: note = Variant of the Homo Sapiens Lysosomal alpha-glucosidase
  source 1..2832: mol_type = other DNA
atggaatggagctgggtctttctcttcttcctgtcagtaacgactggtgtccactccggacacattctgtggcatgatttttctaccgtgcctagagagctttccggttcaagtcaagtcctcgaagaaacacatccagcccatcagatgggcgcatctaggccgggccctcgggacgctcaactccacccagggagacctagggccgttcccactcagtgcgacgtgccagagaactcacgcttcgattgtgcacctgagaaggctatcacgcaagagcagtgcgaggcccgcggatgttgttacataccggctaaacaggggctgcagggtgcgcagatgggccaaccttggtgcttcttcccaccatcctatccgagttacaagctggagaatctctcccagtctgaaatgggatataccgcaacactgactcggaccaccccctccttctttcccaaagatatcttgactctgagacttgacgtaatgatggagacagaaaacaggctccactttaccattaaggaccctgccaatcgccgatacgaggtgcctctggaaacaccacacgtgcacagtagagctccatcacctctgtattctgtcgagttctccgaagagccgtttggcgttatcgtcaggaggcagctcgacgggcgagtgcttctgaacacgactgtggccccgttgttctttgcggatcagtttctgcaactgtcaacaagtctcccttctcagtacattaccgggcttgcagagcatctgtccccactcatgctgagtacttcatggaacaaaatcacactgtggaatagagaccttgctcctactccaggagccaacttgtatggttctcaccctttctacttggccctggaagatggcggatcagcgcatggcgtattcctcctgaattccaacgcaatggacgttgttcttcagccatctcctgctttgagttggagatctacaggcgggatactggacgtctacatctttctgggtccagagcctaaatccgtagtgcagcagtatcttgatgtcgtcggatacccgtttatgccaccatattggggcctggggttccacttgtgccgctggggatattcatccaccgccattacacgacaagttgttgagaatatgaccagggcacattttcctctggatgtacagtggaacgacctggactacatggatagtcgccgcgacttcaccttcaataaggatgggttcagagactttcctgctatggtccaagaacttcaccagggaggcaggaggtacatgatgatcgtagatccgggaatttcttcttctggcccagccggttcatacagaccgtatgacgaaggactgcgacgaggcgtctttatcacgaacgagactggtcagcctttgataggcaaggtttggccagggtccaccgctttcccggatttcacaaatcctgaggcactggcctggtgggaagatatggtcgccgagtttcacgaccaggtcccatttgacgggatgtggatcgacatgaacgagccatccaacttcattagaggaagtgtggatggctgtccgaataatgagctggaaaaccctccttacgtaccaggcgttgttggtgggactcttcaagctgcgacgatttgcgcatcctcccatcagttcctgtcaacccactataacttgcacaatctgtacgggacaacagaggctatcgccagtcatagggccctggtaaaagctagaggaacacgccctttcgttatctctcgctcaacttttgcaggccacggtaggtatgccggacattggaccggcgacgtctggagttcttgggaacagctggcttcctccgttccagagatattgcagtttaacctgttgggagtcccacttgtaggtgcagatgtttgtggcttcctggggaacacctcagaagaattgtgcgtaagatggactcaactgggcgccttctacccttttatgcgcaatcacaactcactgacatctttgcctcaagaaccgtactcatttagtgagccagcacagcaggccatgaggaaggctcttggcctgagatatgcacttctgccgcatctgtacacccttttccaccaggctcatgtccatggagagactgttgcacgacctctgttcttggagttcccaaaagactcttccacgtggacagtcgatcaccagatgctgtggggcgaggctctgctgattacacctgtattgcaacctggtaaggccgaagttaccgggtactttccattggggacctggtatgatctgcaaacagtcccggttgaagctcttggaagtcttccacctccacctgctgcaccaagggagcctgcgatccactctgaaggacagtgggtaactttgcctgcaccgctggacaccatcaatgtccatctgcgcgaaggctacatcataccacttcaaggtcctggactgaccactacagagtctagaaaacaaccaatggctcttgctgttgcactgactaaaagcggcgaagcaaggggtgagctgttctgggacgacggagagtcactggaggtactcgaacgaggcgcgtatacgcaggtcatttttgaggctcgcaataatacgatcgttaacgagctggtccacgtcacttcagaaggtgcaggccttcagttgggcaaggtaactgtcctgggagttgctacagcaccgcagcaggtcttgtccaacggacggcccgtaagcaactttacctatagtcctgataccaaagttctggacatctgcgttgctctgctgatgggtgagcagttcctggtatcatggtgc

SEQ ID NO: 500 - protein, 944 aa, synthetic construct
  REGION 1..944: note = Variant of the Homo Sapiens Lysosomal alpha-glucosidase
MEWSWVFLFFLSVTTGVHSGHILWHDFSTVPRELSGSSQVLEETHPAHQMGASRPGPRDAQLHPGRPRAVPTQCDVPENSRFDCAPEKAITQEQCEARGCCYIPAKQGLQGAQMGQPWCFFPPSYPSYKLENLSQSEMGYTATLTRTTPSFFPKDILTLRLDVMMETENRLHFTIKDPANRRYEVPLETPHVHSRAPSPLYSVEFSEEPFGVIVRRQLDGRVLLNTTVAPLFFADQFLQLSTSLPSQYITGLAEHLSPLMLSTSWNKITLWNRDLAPTPGANLYGSHPFYLALEDGGSAHGVFLLNSNAMDVVLQPSPALSWRSTGGILDVYIFLGPEPKSVVQQYLDVVGYPFMPPYWGLGFHLCRWGYSSTAITRQVVENMTRAHFPLDVQWNDLDYMDSRRDFTFNKDGFRDFPAMVQELHQGGRRYMMIVDPGISSSGPAGSYRPYDEGLRRGVFITNETGQPLIGKVWPGSTAFPDFTNPEALAWWEDMVAEFHDQVPFDGMWIDMNEPSNFIRGSVDGCPNNELENPPYVPGVVGGTLQAATICASSHQFLSTHYNLHNLYGTTEAIASHRALVKARGTRPFVISRSTFAGHGRYAGHWTGDVWSSWEQLASSVPEILQFNLLGVPLVGADVCGFLGNTSEELCVRWTQLGAFYPFMRNHNSLTSLPQEPYSFSEPAQQAMRKALGLRYALLPHLYTLFHQAHVHGETVARPLFLEFPKDSSTWTVDHQMLWGEALLITPVLQPGKAEVTGYFPLGTWYDLQTVPVEALGSLPPPPAAPREPAIHSEGQWVTLPAPLDTINVHLREGYIIPLQGPGLTTTESRKQPMALAVALTKSGEARGELFWDDGESLEVLERGAYTQVIFEARNNTIVNELVHVTSEGAGLQLGKVTVLGVATAPQQVLSNGRPVSNFTYSPDTKVLDICVALLMGEQFLVSWC

SEQ ID NO: 501 - DNA, 2832 bp, synthetic construct
  misc_feature 1..2832: note = Variant of the Homo Sapiens Lysosomal alpha-glucosidase
  source 1..2832: mol_type = other DNA
atggaatggagctgggtctttctcttcttcctgtcagtaacgactggtgtccactccggacacattctgtggcatgatttttctaccgtgcctagagagctttccggttcaagtcaagtcctcgaagaaacacatccagcccatcaggttggcgcatctaggccgggccctcgggacgctcaactccacccagggagacctagggccgttcccactcagtgcgacgtgccagagaactcacgcttcgattgtgcacctgagaaggctatcacgcaagagcagtgcgaggcccgcggatgttgttacataccggctaaacaggggctgcagggtgcgcagatgggccaaccttggtgcttcttcccaccatcctatccgagttacaagctggagaatctctcccagtctgaaatgggatataccgcaacactgactcggaccaccccctccttctttcccaaagatatcttgactctgagacttgacgtaatgatggagacagaaaacaggctccactttaccattaaggaccctgccaatcgccgatacgaggtgcctctggaaacaccacacgtgcacagtagagctccatcacctctgtattctgtcgagttctccgaagagccgtttggcgttatcgtcaggaggcagctcgacgggcgagtgcttctgaacacgactgtggccccgttgttctttgcggatcagtttctgcaactgtcaacaagtctcccttctcagtacattaccgggcttgcagagcatctgtccccactcatgctgagtacttcatggaacaaaatcacactgtggaatagagaccttgctcctactccaggagccaacttgtatggttctcaccctttctacttggccctggaagatggcggatcagcgcatggcgtattcctcctgaattccaacgcaatggacgttgttcttcagccatctcctgctttgagttggagatctacaggcgggatactggacgtctacatctttctgggtccagagcctaaatccgtagtgcagcagtatcttgatgtcgtcggatacccgtttatgccaccatattggggcctggggttccacttgtgccgctggggatattcatccaccgccattacacgacaagttgttgagaatatgaccagggcacattttcctctggatgtacagtggaacgacctggactacatggatagtcgccgcgacttcaccttcaataaggatgggttcagagactttcctgctatggtccaagaacttcaccagggaggcaggaggtacatgatgatcgtagatccgggaatttcttcttctggcccagccggttcatacagaccgtatgacgaaggactgcgacgaggcgtctttatcacgaacgagactggtcagcctttgataggcaaggtttggccagggtccaccgctttcccggatttcacaaatccttacgcactggcctggtgggaagatatggtcgccgagtttcacgaccaggtcccatttgacgggatgtggatcgacatgaacgagccatccaacttcattagaggaagtgtggatggctgtccgaataatgagctggaaaaccctccttacgtaccaggcgttgttggtgggactcttcaagctgcgacgatttgcgcatcctcccatcagttcctgtcaacccactataacttgcacaatctgtacgggacaacagaggctatcgccagtcatagggccctggtaaaagctagaggaacacgccctttcgttatctctcgctcaacttttgcaggccacggtaggtatgccggacattggaccggcgacgtctggagttcttgggaacagctggcttcctccgttccagagatattgcagtttaacctgttgggagtcccacttgtaggtgcagatgtttgtggcttcctggggaacacctcagaagaattgtgcgtaagatggactcaactgggcgccttctacccttttatgcgcaatcacaactcactgacatctttgcctcaagaaccgtactcatttagtgagccagcacagcaggccatgaggaaggctcttggcctgagatatgcacttctgccgcatctgtacacccttttccaccaggctcatgtccatggagagactgttgcacgacctctgttcttggagttcccaaaagactcttccacgtggacagtcgatcaccagatgctgtggggcgaggctctgctgattacacctgtattgcaacctggtaaggccgaagttaccgggtactttccattggggacctggtatgatctgcaaacagtcccggttgaagctcttggaagtcttccacctccacctgctgcaccaagggagcctgcgatccactctgaaggacagtgggtaactttgcctgcaccgctggacaccatcaatgtccatctgcgcgaaggctacatcataccacttcaaggtcctggactgaccactacagagtctagaaaacaaccaatggctcttgctgttgcactgactaaaagcggcgaagcaaggggtgagctgttctgggacgacggagagtcactggaggtactcgaacgaggcgcgtatacgcaggtcatttttgaggctcgcaataatacgatcgttaacgagctggtccacgtcacttcagaaggtgcaggccttcagttgggcaaggtaactgtcctgggagttgctacagcaccgcagcaggtcttgtccaacggacggcccgtaagcaactttacctatagtcctgataccaaagttctggacatctgcgttgctctgctgatgggtgagcagttcctggtatcatggtgc

SEQ ID NO: 502 - protein, 944 aa, synthetic construct
  REGION 1..944: note = Variant of the Homo Sapiens Lysosomal alpha-glucosidase
MEWSWVFLFFLSVTTGVHSGHILWHDFSTVPRELSGSSQVLEETHPAHQVGASRPGPRDAQLHPGRPRAVPTQCDVPENSRFDCAPEKAITQEQCEARGCCYIPAKQGLQGAQMGQPWCFFPPSYPSYKLENLSQSEMGYTATLTRTTPSFFPKDILTLRLDVMMETENRLHFTIKDPANRRYEVPLETPHVHSRAPSPLYSVEFSEEPFGVIVRRQLDGRVLLNTTVAPLFFADQFLQLSTSLPSQYITGLAEHLSPLMLSTSWNKITLWNRDLAPTPGANLYGSHPFYLALEDGGSAHGVFLLNSNAMDVVLQPSPALSWRSTGGILDVYIFLGPEPKSVVQQYLDVVGYPFMPPYWGLGFHLCRWGYSSTAITRQVVENMTRAHFPLDVQWNDLDYMDSRRDFTFNKDGFRDFPAMVQELHQGGRRYMMIVDPGISSSGPAGSYRPYDEGLRRGVFITNETGQPLIGKVWPGSTAFPDFTNPYALAWWEDMVAEFHDQVPFDGMWIDMNEPSNFIRGSVDGCPNNELENPPYVPGVVGGTLQAATICASSHQFLSTHYNLHNLYGTTEAIASHRALVKARGTRPFVISRSTFAGHGRYAGHWTGDVWSSWEQLASSVPEILQFNLLGVPLVGADVCGFLGNTSEELCVRWTQLGAFYPFMRNHNSLTSLPQEPYSFSEPAQQAMRKALGLRYALLPHLYTLFHQAHVHGETVARPLFLEFPKDSSTWTVDHQMLWGEALLITPVLQPGKAEVTGYFPLGTWYDLQTVPVEALGSLPPPPAAPREPAIHSEGQWVTLPAPLDTINVHLREGYIIPLQGPGLTTTESRKQPMALAVALTKSGEARGELFWDDGESLEVLERGAYTQVIFEARNNTIVNELVHVTSEGAGLQLGKVTVLGVATAPQQVLSNGRPVSNFTYSPDTKVLDICVALLMGEQFLVSWC

SEQ ID NO: 503 - DNA, 2832 bp, synthetic construct
  misc_feature 1..2832: note = Variant of the Homo Sapiens Lysosomal alpha-glucosidase
  source 1..2832: mol_type = other DNA
atggaatggagctgggtctttctcttcttcctgtcagtaacgactggtgtccactccggacacattctgtggcatgatttttctaccgtgcctagagagctttccggttcaagtcaagtcctcgaagaaacacatccagcccatcaggttggcgcatctaggccgggccctcgggacgctcaactccacccagggagacctagggccgttcccactcagtgcgacgtgccagagaactcacgcttcgattgtgcacctgagaaggctatcacgcaagagcagtgcgaggcccgcggatgttgttacataccggctaaacaggggctgcagggtgcgcagatgggccaaccttggtgcttcttcccaccatcctatccgagttacaagctggagaatctctcccagtctgaaatgggatataccgcaacactgactcggaccaccccctccttctttcccaaagatatcttgactctgagacttgacgtaatgatggagacagaaaacaggctccactttaccattaaggaccctgccaatcgccgatacgaggtgcctctggaaacaccacacgtgcacagtagagctccatcacctctgtattctgtcgagttctccgaagagccgtttggcgttatcgtcaggaggcagctcgacgggcgagtgcttctgaacacgactgtggccccgttgttctttgcggatcagtttctgcaactgtcaacaagtctcccttctcagtacattaccgggcttgcagagcatctgtccccactcatgctgagtacttcatggaacaaaatcacactgtggaatagagaccttgctcctactccaggagccaacttgtatggttctcaccctttctacttggccctggaagatggcggatcagcgcatggcgtattcctcctgaattccaacgcaatggacgttgttcttcagccatctcctgctttgagttggagatctacaggcgggatactggacgtctacatctttctgggtccagagcctaaatccgtagtgcagcagtatcttgatgtcgtcggatacccgtttatgccaccatattggggcctggggttccacttgtgccgctggggatattcatccaccgccattacacgacaagttgttgagaatatgaccagggcacattttcctctggatgtacagtggaacgacctggactacatggatagtcgccgcgacttcaccttcaataaggatgggttcagagactttcctgctatggtccaagaacttcaccagggaggcaggaggtacatgatgatcgtagatccgggaatttcttcttctggcccagccggttcatacagaccgtatgacgaaggactgcgacgaggcgtctttatcacgaacgagactggtcagcctttgataggcaaggtttggccagggtccaccgctttcccggatttcacaaatcctgaggcactggcctggtgggaagatatggtcgccgagtttcacgaccaggtcccatttgacgggatgtggatcgacatgaacgagccatccaacttcattagaggaagtgtggatggctgtccgaataatgagctggaaaaccctccttacgtaccaggcgttgttggtgggactcttcaagctgcgacgatttgcgcatcctcccatcagttcctgtcaacccactataacttgcacaatctgtacgggacaacagaggctatcgccagtcatagggccctggtaaaagctagaggaacacgccctttcgttatctctcgctcaacttttgcaggccacggtaggtatgccggacattggaccggcgacgtctggagttcttgggaacagctggcttcctccgttccagagatattgcagtttaacctgttgggagtcccacttgtaggtgcagatgtttgtggcttcctggggaacacctcagaagaattgtgcgtaagatggactcaactgggcgccttctacccttttatgcgcaatcacaactcactgcgctctttgcctcaagaaccgtactcatttagtgagccagcacagcaggccatgaggaaggctcttggcctgagatatgcacttctgccgcatctgtacacccttttccaccaggctcatgtccatggagagactgttgcacgacctctgttcttggagttcccaaaagactcttccacgtggacagtcgatcaccagatgctgtggggcgaggctctgctgattacacctgtattgcaacctggtaaggccgaagttaccgggtactttccattggggacctggtatgatctgcaaacagtcccggttgaagctcttggaagtcttccacctccacctgctgcaccaagggagcctgcgatccactctgaaggacagtgggtaactttgcctgcaccgctggacaccatcaatgtccatctgcgcgaaggctacatcataccacttcaaggtcctggactgaccactacagagtctagaaaacaaccaatggctcttgctgttgcactgactaaaagcggcgaagcaaggggtgagctgttctgggacgacggagagtcactggaggtactcgaacgaggcgcgtatacgcaggtcatttttgaggctcgcaataatacgatcgttaacgagctggtccacgtcacttcagaaggtgcaggccttcagttgggcaaggtaactgtcctgggagttgctacagcaccgcagcaggtcttgtccaacggacggcccgtaagcaactttacctatagtcctgataccaaagttctggacatctgcgttgctctgctgatgggtgagcagttcctggtatcatggtgc

SEQ ID NO: 504 - protein, 944 aa, synthetic construct
  REGION 1..944: note = Variant of the Homo Sapiens Lysosomal alpha-glucosidase
MEWSWVFLFFLSVTTGVHSGHILWHDFSTVPRELSGSSQVLEETHPAHQVGASRPGPRDAQLHPGRPRAVPTQCDVPENSRFDCAPEKAITQEQCEARGCCYIPAKQGLQGAQMGQPWCFFPPSYPSYKLENLSQSEMGYTATLTRTTPSFFPKDILTLRLDVMMETENRLHFTIKDPANRRYEVPLETPHVHSRAPSPLYSVEFSEEPFGVIVRRQLDGRVLLNTTVAPLFFADQFLQLSTSLPSQYITGLAEHLSPLMLSTSWNKITLWNRDLAPTPGANLYGSHPFYLALEDGGSAHGVFLLNSNAMDVVLQPSPALSWRSTGGILDVYIFLGPEPKSVVQQYLDVVGYPFMPPYWGLGFHLCRWGYSSTAITRQVVENMTRAHFPLDVQWNDLDYMDSRRDFTFNKDGFRDFPAMVQELHQGGRRYMMIVDPGISSSGPAGSYRPYDEGLRRGVFITNETGQPLIGKVWPGSTAFPDFTNPEALAWWEDMVAEFHDQVPFDGMWIDMNEPSNFIRGSVDGCPNNELENPPYVPGVVGGTLQAATICASSHQFLSTHYNLHNLYGTTEAIASHRALVKARGTRPFVISRSTFAGHGRYAGHWTGDVWSSWEQLASSVPEILQFNLLGVPLVGADVCGFLGNTSEELCVRWTQLGAFYPFMRNHNSLRSLPQEPYSFSEPAQQAMRKALGLRYALLPHLYTLFHQAHVHGETVARPLFLEFPKDSSTWTVDHQMLWGEALLITPVLQPGKAEVTGYFPLGTWYDLQTVPVEALGSLPPPPAAPREPAIHSEGQWVTLPAPLDTINVHLREGYIIPLQGPGLTTTESRKQPMALAVALTKSGEARGELFWDDGESLEVLERGAYTQVIFEARNNTIVNELVHVTSEGAGLQLGKVTVLGVATAPQQVLSNGRPVSNFTYSPDTKVLDICVALLMGEQFLVSWC

SEQ ID NO: 505 - DNA, 2832 bp, synthetic construct
  misc_feature 1..2832: note = Variant of the Homo Sapiens Lysosomal alpha-glucosidase
  source 1..2832: mol_type = other DNA
atggaatggagctgggtctttctcttcttcctgtcagtaacgactggtgtccactccggacacattctgatgcatgatttttctaccgtgcctagagagctttccggttcaagtcaagtcctcgaagaaacacatccagcccatcaggttggcgcatctaggccgggccctcgggacgctcaactccacccagggagacctagggccgttcccactcagtgcgacgtgccagagaactcacgcttcgattgtgcacctgagaaggctatcacgcaagagcagtgcgaggcccgcggatgttgttacataccggctaaacaggggctgcagggtgcgcagatgggccaaccttggtgcttcttcccaccatcctatccgagttacaagctggagaatctctcccagtctgaaatgggatataccgcaacactgactcggaccaccccctccttctttcccaaagatatcttgactctgagacttgacgtaatgatggagacagaaaacaggctccactttaccattaaggaccctgccaatcgccgatacgaggtgcctctggaaacaccacacgtgcacagtagagctccatcacctctgtattctgtcgagttctccgaagagccgtttggcgttatcgtcaggaggcagctcgacgggcgagtgcttctgaacacgactgtggccccgttgttctttgcggatcagtttctgcaactgtcaacaagtctcccttctcagtacattaccgggcttgcagagcatctgtccccactcatgctgagtacttcatggaacaaaatcacactgtggaatagagaccttgctcctactccaggagccaacttgtatggttctcaccctttctacttggccctggaagatggcggatcagcgcatggcgtattcctcctgaattccaacgcaatggacgttgttcttcagccatctcctgctttgagttggagatctacaggcgggatactggacgtctacatctttctgggtccagagcctaaatccgtagtgcagcagtatcttgatgtcgtcggatacccgtttatgccaccatattggggcctggggttccacttgtgccgctggggatattcatccaccgccattacacgacaagttgttgagaatatgaccagggcacattttcctctggatgtacagtggaacgacctggactacatggatagtcgccgcgacttcaccttcaataaggatgggttcagagactttcctgctatggtccaagaacttcaccagggaggcaggaggtacatgatgatcgtagatccgggaatttcttcttctggcccagccggttcatacagaccgtatgacgaaggactgcgacgaggcgtctttatcacgaacgagactggtcagcctttgataggcaaggtttggccagggtccaccgctttcccggatttcacaaatcctgaggcactggcctggtgggaagatatggtcgccgagtttcacgaccaggtcccatttgacgggatgtggatcgacatgaacgagccatccaacttcattagaggaagtgtggatggctgtccgaataatgagctggaaaaccctccttacgtaccaggcgttgttggtgggactcttcaagctgcgacgatttgcgcatcctcccatcagttcctgtcaacccactataacttgcacaatctgtacgggacaacagaggctatcgccagtcatagggccctggtaaaagctagaggaacacgccctttcgttatctctcgctcaacttttgcaggccacggtaggtatgccggacattggaccggcgacgtctggagttcttgggaacagctggcttcctccgttccagagatattgcagtttaacctgttgggagtcccacttgtaggtgcagatgtttgtggcttcctggggaacacctcagaagaattgtgcgtaagatggactcaactgggcgccttctacccttttatgcgcaatcacaactcactgacatctttgcctcaagaaccgtactcatttagtgagccagcacagcaggccatgaggaaggctcttggcctgagatatgcacttctgccgcatctgtacacccttttccaccaggctcatgtccatggagagactgttgcacgacctctgttcttggagttcccaaaagactcttccacgtggacagtcgatcaccagatgctgtggggcgaggctctgctgattacacctgtattgcaacctggtaaggccgaagttaccgggtactttccattggggacctggtatgatctgcaaacagtcccggttgaagctcttggaagtcttccacctccacctgctgcaccaagggagcctgcgatccactctgaaggacagtgggtaactttgcctgcaccgctggacaccatcaatgtccatctgcgcgaaggctacatcataccacttcaaggtcctggactgaccactacagagtctagaaaacaaccaatggctcttgctgttgcactgactaaaagcggcgaagcaaggggtgagctgttctgggacgacggagagtcactggaggtactcgaacgaggcgcgtatacgcaggtcatttttgaggctcgcaataatacgatcgttaacgagctggtccacgtcacttcagaaggtgcaggccttcagttgggcaaggtaactgtcctgggagttgctacagcaccgcagcaggtcttgtccaacggacggcccgtaagcaactttacctatagtcctgataccaaagttctggacatctgcgttgctctgctgatgggtgagcagttcctggtatcatggtgc

SEQ ID NO: 506 - protein, 944 aa, synthetic construct
  REGION 1..944: note = Variant of the Homo Sapiens Lysosomal alpha-glucosidase
MEWSWVFLFFLSVTTGVHSGHILMHDFSTVPRELSGSSQVLEETHPAHQVGASRPGPRDAQLHPGRPRAVPTQCDVPENSRFDCAPEKAITQEQCEARGCCYIPAKQGLQGAQMGQPWCFFPPSYPSYKLENLSQSEMGYTATLTRTTPSFFPKDILTLRLDVMMETENRLHFTIKDPANRRYEVPLETPHVHSRAPSPLYSVEFSEEPFGVIVRRQLDGRVLLNTTVAPLFFADQFLQLSTSLPSQYITGLAEHLSPLMLSTSWNKITLWNRDLAPTPGANLYGSHPFYLALEDGGSAHGVFLLNSNAMDVVLQPSPALSWRSTGGILDVYIFLGPEPKSVVQQYLDVVGYPFMPPYWGLGFHLCRWGYSSTAITRQVVENMTRAHFPLDVQWNDLDYMDSRRDFTFNKDGFRDFPAMVQELHQGGRRYMMIVDPGISSSGPAGSYRPYDEGLRRGVFITNETGQPLIGKVWPGSTAFPDFTNPEALAWWEDMVAEFHDQVPFDGMWIDMNEPSNFIRGSVDGCPNNELENPPYVPGVVGGTLQAATICASSHQFLSTHYNLHNLYGTTEAIASHRALVKARGTRPFVISRSTFAGHGRYAGHWTGDVWSSWEQLASSVPEILQFNLLGVPLVGADVCGFLGNTSEELCVRWTQLGAFYPFMRNHNSLTSLPQEPYSFSEPAQQAMRKALGLRYALLPHLYTLFHQAHVHGETVARPLFLEFPKDSSTWTVDHQMLWGEALLITPVLQPGKAEVTGYFPLGTWYDLQTVPVEALGSLPPPPAAPREPAIHSEGQWVTLPAPLDTINVHLREGYIIPLQGPGLTTTESRKQPMALAVALTKSGEARGELFWDDGESLEVLERGAYTQVIFEARNNTIVNELVHVTSEGAGLQLGKVTVLGVATAPQQVLSNGRPVSNFTYSPDTKVLDICVALLMGEQFLVSWC

SEQ ID NO: 507 - DNA, 2832 bp, synthetic construct
  misc_feature 1..2832: note = Variant of the Homo Sapiens Lysosomal alpha-glucosidase
  source 1..2832: mol_type = other DNA
atggaatggagctgggtctttctcttcttcctgtcagtaacgactggtgtccactccggacacattctgtggcatgatttttctaccgtgcctagagagctttccggttcaagtcaagtcctcgaagaaacacatccagcccatcaggttggcgcatctaggccgggccctcgggacgctcaattccacccagggagacctagggccgttcccactcagtgcgacgtgccagagaactcacgcttcgattgtgcacctgagaaggctatcacgcaagagcagtgcgaggcccgcggatgttgttacataccggctaaacaggggctgcagggtgcgcagatgggccaaccttggtgcttcttcccaccatcctatccgagttacaagctggagaatctctcccagtctgaaatgggatataccgcaacactgactcggaccaccccctccttctttcccaaagatatcttgactctgagacttgacgtaatgatggagacagaaaacaggctccactttaccattaaggaccctgccaatcgccgatacgaggtgcctctggaaacaccacacgtgcacagtagagctccatcacctctgtattctgtcgagttctccgaagagccgtttggcgttatcgtcaggaggcagctcgacgggcgagtgcttctgaacacgactgtggccccgttgttctttgcggatcagtttctgcaactgtcaacaagtctcccttctcagtacattaccgggcttgcagagcatctgtccccactcatgctgagtacttcatggaacaaaatcacactgtggaatagagaccttgctcctactccaggagccaacttgtatggttctcaccctttctacttggccctggaagatggcggatcagcgcatggcgtattcctcctgaattccaacgcaatggacgttgttcttcagccatctcctgctttgagttggagatctacaggcgggatactggacgtctacatctttctgggtccagagcctaaatccgtagtgcagcagtatcttgatgtcgtcggatacccgtttatgccaccatattggggcctggggttccacttgtgccgctggggatattcatccaccgccattacacgacaagttgttgagaatatgaccagggcacattttcctctggatgtacagtggaacgacctggactacatggatagtcgccgcgacttcaccttcaataaggatgggttcagagactttcctgctatggtccaagaacttcaccagggaggcaggaggtacatgatgatcgtagatccgggaatttcttcttctggcccagccggttcatacagaccgtatgacgaaggactgcgacgaggcgtctttatcacgaacgagactggtcagcctttgataggcaaggtttggccagggtccaccgctttcccggatttcacaaatcctgaggcactggcctggtgggaagatatggtcgccgagtttcacgaccaggtcccatttgacgggatgtggatcgacatgaacgagccatccaacttcattagaggaagtgtggatggctgtccgaataatgagctggaaaaccctccttacgtaccaggcgttgttggtgggactcttcaagctgcgacgatttgcgcatcctcccatcagttcctgtcaacccactataacttgcacaatctgtacgggacaacagaggctatcgccagtcatagggccctggtaaaagctagaggaacacgccctttcgttatctctcgctcaacttttgcaggccacggtaggtatgccggacattggaccggcgacgtctggagttcttgggaacagctggcttcctccgttccagagatattgcagtttaacctgttgggagtcccacttgtaggtgcagatgtttgtggcttcctggggaacacctcagaagaattgtgcgtaagatggactcaactgggcgccttctacccttttatgcgcaatcacaactcactgacatctttgcctcaagaaccgtactcatttagtgagccagcacagcaggccatgaggaaggctcttggcctgagatatgcacttctgccgcatctgtacacccttttccaccaggctcatgtccatggagagactgttgcacgacctctgttcttggagttcccaaaagactcttccacgtggacagtcgatcaccagatgctgtggggcgaggctctgctgattacacctgtattgcaacctggtaaggccgaagttaccgggtactttccattggggacctggtatgatctgcaaacagtcccggttgaagctcttggaagtcttccacctccacctgctgcaccaagggagcctgcgatccactctgaaggacagtgggtaactttgcctgcaccgctggacaccatcaatgtccatctgcgcgaaggctacatcataccacttcaaggtcctggactgaccactacagagtctagaaaacaaccaatggctcttgctgttgcactgactaaaagcggcgaagcaaggggtgagctgttctgggacgacggagagtcactggaggtactcgaacgaggcgcgtatacgcaggtcatttttgaggctcgcaataatacgatcgttaacgagctggtccacgtcacttcagaaggtgcaggccttcagttgggcaaggtaactgtcctgggagttgctacagcaccgcagcaggtcttgtccaacggacggcccgtaagcaactttacctatagtcctgataccaaagttctggacatctgcgttgctctgctgatgggtgagcagttcctggtatcatggtgc

SEQ ID NO: 508 - protein, 944 aa, synthetic construct
  REGION 1..944: note = Variant of the Homo Sapiens Lysosomal alpha-glucosidase
MEWSWVFLFFLSVTTGVHSGHILWHDFSTVPRELSGSSQVLEETHPAHQVGASRPGPRDAQFHPGRPRAVPTQCDVPENSRFDCAPEKAITQEQCEARGCCYIPAKQGLQGAQMGQPWCFFPPSYPSYKLENLSQSEMGYTATLTRTTPSFFPKDILTLRLDVMMETENRLHFTIKDPANRRYEVPLETPHVHSRAPSPLYSVEFSEEPFGVIVRRQLDGRVLLNTTVAPLFFADQFLQLSTSLPSQYITGLAEHLSPLMLSTSWNKITLWNRDLAPTPGANLYGSHPFYLALEDGGSAHGVFLLNSNAMDVVLQPSPALSWRSTGGILDVYIFLGPEPKSVVQQYLDVVGYPFMPPYWGLGFHLCRWGYSSTAITRQVVENMTRAHFPLDVQWNDLDYMDSRRDFTFNKDGFRDFPAMVQELHQGGRRYMMIVDPGISSSGPAGSYRPYDEGLRRGVFITNETGQPLIGKVWPGSTAFPDFTNPEALAWWEDMVAEFHDQVPFDGMWIDMNEPSNFIRGSVDGCPNNELENPPYVPGVVGGTLQAATICASSHQFLSTHYNLHNLYGTTEAIASHRALVKARGTRPFVISRSTFAGHGRYAGHWTGDVWSSWEQLASSVPEILQFNLLGVPLVGADVCGFLGNTSEELCVRWTQLGAFYPFMRNHNSLTSLPQEPYSFSEPAQQAMRKALGLRYALLPHLYTLFHQAHVHGETVARPLFLEFPKDSSTWTVDHQMLWGEALLITPVLQPGKAEVTGYFPLGTWYDLQTVPVEALGSLPPPPAAPREPAIHSEGQWVTLPAPLDTINVHLREGYIIPLQGPGLTTTESRKQPMALAVALTKSGEARGELFWDDGESLEVLERGAYTQVIFEARNNTIVNELVHVTSEGAGLQLGKVTVLGVATAPQQVLSNGRPVSNFTYSPDTKVLDICVALLMGEQFLVSWC

SEQ ID NO: 509 - DNA, 2832 bp, synthetic construct
  misc_feature 1..2832: note = Variant of the Homo Sapiens Lysosomal alpha-glucosidase
  source 1..2832: mol_type = other DNA
atggaatggagctgggtctttctcttcttcctgtcagtaacgactggtgtccactccggacacattctgtggcatgatttttctaccgtgcctagagagctttccggttcaagtcaagtcctcgaagaaacacatccagcccatcaggttggcgcatctaggccgggccctcgggacgctcaactccacccagggagacctagggccgttcccactcagtgcgacgtgccagagaactcacgcttcgattgtgcacctgagaaggctatcacgcaagagcagtgcgaggcccgcggatgttgttacataccggctaaacaggggctgcagggtgcgcagatgggccaaccttggtgcttcttcccaccatcctatccgagttacaagctggagaatctctcccagtctgaaatgggatataccgcaacactgactcggaccaccccctccttctttcccaaagatatcttgactctgagacttgacgtaatgatggagacagaaaacaggctccactttaccattaaggaccctgccaatcgccgatacgaggtgcctctggaaacaccacacgtgcacagtagagctccatcacctctgtattctgtcgagttctccgaagagccgtttggcgttatcgtcaggaggcagctcgacgggcgagtgcttctgaacacgactgtggccccgttgttctttgcggatcagtttctgcaactgtcaacaagtctcccttctcagtacattaccgggcttgcagagcatctgtccccactcatgctgagtacttcatggaacaaaatcacactgtggaatagagaccttgctcctactccaggagccaacttgtatggttctcaccctttctacttggccctggaagatggcggatcagcgcatggcgtattcctcctgaattccaacgcaatggacgttgttcttcagccatctcctgctttgagttggagatctacaggcgggatactggacgtctacatctttctgggtccagagcctaaatccgtagtgcagcagtatcttgatgtcgtcggatacccgtttatgccaccatattggggcctggggttccacttgtgccgctggggatattcatccaccgccattacacgacaagttgttgagaatatgaccagggcacattttcctctggatgtacagtggaacgacctggactacatggatagtcgccgcgacttcaccttcaataaggatgggttcagagactttcctgctatggtccaagaacttcaccagggaggcaggaggtacatgatgatcgtagatccgggaatttcttcttctggcccagccggttcatacagaccgtatgacgaaggactgcgacgaggcgtctttatcacgaacgagactggtcagcctttgataggcaaggtttggccagggtccaccgctttcccggatttcacaaatcctgaggcactggcctggtgggaagatatggtcgccgagtttcacgaccaggtcccatttgacgggatgtggatcgacatgaacgagccatccaacttcattagaggaagtgtggatggctgtccgaataatgagctggaaaaccctccttacgtaccaggcgttgttggtgggactcttcaagctgcgacgatttgcgcatcctcccatcagttcctgtcaacccactataacttgcacaatctgtacgggtacacagaggctatcgccagtcatagggccctggtaaaagctagaggaacacgccctttcgttatctctcgctcaacttttgcaggccacggtaggtatgccggacattggaccggcgacgtctggagttcttgggaacagctggcttcctccgttccagagatattgcagtttaacctgttgggagtcccacttgtaggtgcagatgtttgtggcttcctggggaacacctcagaagaattgtgcgtaagatggactcaactgggcgccttctacccttttatgcgcaatcacaactcactgacatctttgcctcaagaaccgtactcatttagtgagccagcacagcaggccatgaggaaggctcttggcctgagatatgcacttctgccgcatctgtacacccttttccaccaggctcatgtccatggagagactgttgcacgacctctgttcttggagttcccaaaagactcttccacgtggacagtcgatcaccagatgctgtggggcgaggctctgctgattacacctgtattgcaacctggtaaggccgaagttaccgggtactttccattggggacctggtatgatctgcaaacagtcccggttgaagctcttggaagtcttccacctccacctgctgcaccaagggagcctgcgatccactctgaaggacagtgggtaactttgcctgcaccgctggacaccatcaatgtccatctgcgcgaaggctacatcataccacttcaaggtcctggactgaccactacagagtctagaaaacaaccaatggctcttgctgttgcactgactaaaagcggcgaagcaaggggtgagctgttctgggacgacggagagtcactggaggtactcgaacgaggcgcgtatacgcaggtcatttttgaggctcgcaataatacgatcgttaacgagctggtccacgtcacttcagaaggtgcaggccttcagttgggcaaggtaactgtcctgggagttgctacagcaccgcagcaggtcttgtccaacggacggcccgtaagcaactttacctatagtcctgataccaaagttctggacatctgcgttgctctgctgatgggtgagcagttcctggtatcatggtgc

SEQ ID NO: 510 - protein, 944 aa, synthetic construct
  REGION 1..944: note = Variant of the Homo Sapiens Lysosomal alpha-glucosidase
MEWSWVFLFFLSVTTGVHSGHILWHDFSTVPRELSGSSQVLEETHPAHQVGASRPGPRDAQLHPGRPRAVPTQCDVPENSRFDCAPEKAITQEQCEARGCCYIPAKQGLQGAQMGQPWCFFPPSYPSYKLENLSQSEMGYTATLTRTTPSFFPKDILTLRLDVMMETENRLHFTIKDPANRRYEVPLETPHVHSRAPSPLYSVEFSEEPFGVIVRRQLDGRVLLNTTVAPLFFADQFLQLSTSLPSQYITGLAEHLSPLMLSTSWNKITLWNRDLAPTPGANLYGSHPFYLALEDGGSAHGVFLLNSNAMDVVLQPSPALSWRSTGGILDVYIFLGPEPKSVVQQYLDVVGYPFMPPYWGLGFHLCRWGYSSTAITRQVVENMTRAHFPLDVQWNDLDYMDSRRDFTFNKDGFRDFPAMVQELHQGGRRYMMIVDPGISSSGPAGSYRPYDEGLRRGVFITNETGQPLIGKVWPGSTAFPDFTNPEALAWWEDMVAEFHDQVPFDGMWIDMNEPSNFIRGSVDGCPNNELENPPYVPGVVGGTLQAATICASSHQFLSTHYNLHNLYGYTEAIASHRALVKARGTRPFVISRSTFAGHGRYAGHWTGDVWSSWEQLASSVPEILQFNLLGVPLVGADVCGFLGNTSEELCVRWTQLGAFYPFMRNHNSLTSLPQEPYSFSEPAQQAMRKALGLRYALLPHLYTLFHQAHVHGETVARPLFLEFPKDSSTWTVDHQMLWGEALLITPVLQPGKAEVTGYFPLGTWYDLQTVPVEALGSLPPPPAAPREPAIHSEGQWVTLPAPLDTINVHLREGYIIPLQGPGLTTTESRKQPMALAVALTKSGEARGELFWDDGESLEVLERGAYTQVIFEARNNTIVNELVHVTSEGAGLQLGKVTVLGVATAPQQVLSNGRPVSNFTYSPDTKVLDICVALLMGEQFLVSWC

SEQ ID NO: 511 - DNA, 2832 bp, synthetic construct
  misc_feature 1..2832: note = Variant of the Homo Sapiens Lysosomal alpha-glucosidase
  source 1..2832: mol_type = other DNA
atggaatggagctgggtctttctcttcttcctgtcagtaacgactggtgtccactccggacacattctgtggcatgatttttctaccgtgcctagagagctttccggttcaagtcaagtcctcgaagaaacacatccagcccatcaggttggcgcatctaggccgggccctcgggacgctcaactccacccagggagacctagggccgttcccactcagtgcgacgtgccagagaactcacgcttcgattgtgcacctgagaaggctatcacgcaagagcagtgcgaggcccgcggatgttgttacataccggctaaacaggggctgcagggtgcgcagatgggccaaccttggtgcttcttcccaccatcctatccgagttacaagctggagaatctctcccagtctgaaatgggatataccgcaacactgactcggaccaccccctccttctttcccaaagatatcttgactctgagacttgacgtaatgatggagacagaaaacaggctccactttaccattaaggaccctgccaatcgccgatacgaggtgcctctggaaacaccacacgtgcacagtagagctccatcacctctgtattctgtcgagttctccgaagagccgtttggcgttatcgtcaggaggcagctcgacgggcgagtgcttctgaacacgactgtggccccgttgttctttgcggatcagtttctgcaactgtcaacaagtctcccttctcagtacattaccgggcttgcagagcatctgtccccactcatgctgagtacttcatggaacaaaatcacactgtggaatagagaccttgctcctactccaggagccaacttgtatggttctcaccctttctacttggccctggaagatggcggatcagcgcatggcgtattcctcctgaattccaacgcaatggacgttgttcttcagccatctcctgctttgagttggagatctacaggcgggatactggacgtctacatctttctgggtccagagcctaaatccgtagtgcagcagtatcttgatgtcgtcggatacccgtttatgccaccatattggggcctggggttccacttgtgccgctggggatattcatccaccgccattacacgacaagttgttgagaatatgaccagggcacattttcctctggatgtacagtggaacgacctggactacatggatagtcgccgcgacttcaccttcaataaggatgggttcagagactttcctgctatggtccaagaacttcaccagggaggcaggaggtacatgatgatcgtagatccgggaatttcttcttctggcccagccggttcatacagaccgtatgacgaaggactgcgacgaggcgtctttatcacgaacgagactggtcagcctttgataggcaaggtttggccagggtccaccgctttcccggatttcacaaatcctgaggcactggcctggtgggaagatatggtcgccgagtttcacgaccaggtcccatttgacgggatgtggatcgacatgaacgagccatccaacttcattagaggaagtgtggatggctgtccgaataatgagctggaaaaccctccttacgtaccaggcgttgttggtgggactcttcaagctgcgacgatttgcgcatcctcccatcagttcctgtcaacccactataacttgcacaatctgtacgggacaacagaggctatcgccagtcatagggccctggtaaaagctagaggaacacgccctttcgttatctctcgctcaacttttgcaggccacggtaggtatgccggacattggaccggcgacgtctggagttcttgggaacagctggcttcctccgttccagagatattgcagtttaacctgttgggagtcccacttgtaggtgcagatgtttgtggcttcctggggaacacctcagaagaattgtgcgtaagatggactcaactgggcgccttctacccttttatgcgcaatcacaactcactgacatctttgcctcaagaaccgtactcatttagtgagccagcacagcaggccatgaggaaggctcttggcctgagatatgcacttctgccgcatctgtacacccttttccaccaggctcatgtccagggagagactgttgcacgacctctgttcttggagttcccaaaagactcttccacgtggacagtcgatcaccagatgctgtggggcgaggctctgctgattacacctgtattgcaacctggtaaggccgaagttaccgggtactttccattggggacctggtatgatctgcaaacagtcccggttgaagctcttggaagtcttccacctccacctgctgcaccaagggagcctgcgatccactctgaaggacagtgggtaactttgcctgcaccgctggacaccatcaatgtccatctgcgcgaaggctacatcataccacttcaaggtcctggactgaccactacagagtctagaaaacaaccaatggctcttgctgttgcactgactaaaagcggcgaagcaaggggtgagctgttctgggacgacggagagtcactggaggtactcgaacgaggcgcgtatacgcaggtcatttttgaggctcgcaataatacgatcgttaacgagctggtccacgtcacttcagaaggtgcaggccttcagttgggcaaggtaactgtcctgggagttgctacagcaccgcagcaggtcttgtccaacggacggcccgtaagcaactttacctatagtcctgataccaaagttctggacatctgcgttgctctgctgatgggtgagcagttcctggtatcatggtgc

SEQ ID NO: 512 - protein, 944 aa, synthetic construct
  REGION 1..944: note = Variant of the Homo Sapiens Lysosomal alpha-glucosidase
MEWSWVFLFFLSVTTGVHSGHILWHDFSTVPRELSGSSQVLEETHPAHQVGASRPGPRDAQLHPGRPRAVPTQCDVPENSRFDCAPEKAITQEQCEARGCCYIPAKQGLQGAQMGQPWCFFPPSYPSYKLENLSQSEMGYTATLTRTTPSFFPKDILTLRLDVMMETENRLHFTIKDPANRRYEVPLETPHVHSRAPSPLYSVEFSEEPFGVIVRRQLDGRVLLNTTVAPLFFADQFLQLSTSLPSQYITGLAEHLSPLMLSTSWNKITLWNRDLAPTPGANLYGSHPFYLALEDGGSAHGVFLLNSNAMDVVLQPSPALSWRSTGGILDVYIFLGPEPKSVVQQYLDVVGYPFMPPYWGLGFHLCRWGYSSTAITRQVVENMTRAHFPLDVQWNDLDYMDSRRDFTFNKDGFRDFPAMVQELHQGGRRYMMIVDPGISSSGPAGSYRPYDEGLRRGVFITNETGQPLIGKVWPGSTAFPDFTNPEALAWWEDMVAEFHDQVPFDGMWIDMNEPSNFIRGSVDGCPNNELENPPYVPGVVGGTLQAATICASSHQFLSTHYNLHNLYGTTEAIASHRALVKARGTRPFVISRSTFAGHGRYAGHWTGDVWSSWEQLASSVPEILQFNLLGVPLVGADVCGFLGNTSEELCVRWTQLGAFYPFMRNHNSLTSLPQEPYSFSEPAQQAMRKALGLRYALLPHLYTLFHQAHVQGETVARPLFLEFPKDSSTWTVDHQMLWGEALLITPVLQPGKAEVTGYFPLGTWYDLQTVPVEALGSLPPPPAAPREPAIHSEGQWVTLPAPLDTINVHLREGYIIPLQGPGLTTTESRKQPMALAVALTKSGEARGELFWDDGESLEVLERGAYTQVIFEARNNTIVNELVHVTSEGAGLQLGKVTVLGVATAPQQVLSNGRPVSNFTYSPDTKVLDICVALLMGEQFLVSWC

SEQ ID NO: 513 - DNA, 2832 bp, synthetic construct
  misc_feature 1..2832: note = Variant of the Homo Sapiens Lysosomal alpha-glucosidase
  source 1..2832: mol_type = other DNA
atggaatggagctgggtctttctcttcttcctgtcagtaacgactggtgtccactccggacacattctgtggcatgatttttctaccgtgcctagagagctttccggttcaagtcaagtcctcgaagaaacacatccagcccatcaggttggcgcatctaggccgggccctcgggacgctcaactccacccagggagacctagggccgttcccactcagtgcgacgtgccagagaactcacgcttcgattgtgcacctgagaaggctatcacgcaagagcagtgcgaggcccgcggatgttgttacataccggctaaacaggggctgcagggtgcgcagatgggccaaccttggtgcttcttcccaccatcctatccgagttacaagctggagaatctctcccagtctgaaatgggatataccgcaacactgactcggaccaccccctccttctttcccaaagatatcttgactctgagacttgacgtaatgatggagacagaaaacaggctccactttaccattaaggaccctgccaatcgccgatacgaggtgcctctggaaacaccacacgtgcacagtagagctccatcacctctgtattctgtcgagttctccgaagagccgtttggcgttatcgtcaggaggcagctcgacgggcgagtgcttctgaacacgactgtggccccgttgttctttgcggatcagtttctgcaactgtcaacaagtctcccttctcagtacattaccgggcttgcagagcatctgtccccactcatgctgagtacttcatggaacaaaatcacactgtggaatagagaccttgctcctactccaggagccaacttgtatggttctcaccctttctacttggccctggaagatggcggatcagcgcatggcgtattcctcctgaattccaacgcaatggacgttgttcttcagccatctcctgctttgagttggagatctacaggcgggatactggacgtctacatctttctgggtccagagcctaaatccgtagtgcagcagtatcttgatgtcgtcggatacccgtttatgccaccatattggggcctggggttccacttgtgccgctggggatattcatccaccgccattacacgacaagttgttgagaatatgaccagggcacattttcctctggatgtacagtggaacgacctggactacatggatagtcgccgcgacttcaccttcaataaggatgggttcagagactttcctgctatggtccaagaacttcaccagggaggcaggaggtacatgatgatcgtagatccgggaatttcttcttctggcccagccggttcatacagaccgtatgacgaaggactgcgacgaggcgtctttatcacgaacgagactggtcagcctttgataggcaaggtttggccagggtccaccgctttcccggatttcacaaatcctatagcactggcctggtgggaagatatggtcgccgagtttcacgaccaggtcccatttgacgggatgtggatcgacatgaacgagccatccaacttcattagaggaagtgtggatggctgtccgaataatgagctggaaaaccctccttacgtaccaggcgttgttggtgggactcttcaagctgcgacgatttgcgcatcctcccatcagttcctgtcaacccactataacttgcacaatctgtacgggacaacagaggctatcgccagtcatagggccctggtaaaagctagaggaacacgccctttcgttatctctcgctcaacttttgcaggccacggtaggtatgccggacattggaccggcgacgtctggagttcttgggaacagctggcttcctccgttccagagatattgcagtttaacctgttgggagtcccacttgtaggtgcagatgtttgtggcttcctggggaacacctcagaagaattgtgcgtaagatggactcaactgggcgccttctacccttttatgcgcaatcacaactcactgacatctttgcctcaagaaccgtactcatttagtgagccagcacagcaggccatgaggaaggctcttggcctgagatatgcacttctgccgcatctgtacacccttttccaccaggctcatgtccatggagagactgttgcacgacctctgttcttggagttcccaaaagactcttccacgtggacagtcgatcaccagatgctgtggggcgaggctctgctgattacacctgtattgcaacctggtaaggccgaagttaccgggtactttccattggggacctggtatgatctgcaaacagtcccggttgaagctcttggaagtcttccacctccacctgctgcaccaagggagcctgcgatccactctgaaggacagtgggtaactttgcctgcaccgctggacaccatcaatgtccatctgcgcgaaggctacatcataccacttcaaggtcctggactgaccactacagagtctagaaaacaaccaatggctcttgctgttgcactgactaaaagcggcgaagcaaggggtgagctgttctgggacgacggagagtcactggaggtactcgaacgaggcgcgtatacgcaggtcatttttgaggctcgcaataatacgatcgttaacgagctggtccacgtcacttcagaaggtgcaggccttcagttgggcaaggtaactgtcctgggagttgctacagcaccgcagcaggtcttgtccaacggacggcccgtaagcaactttacctatagtcctgataccaaagttctggacatctgcgttgctctgctgatgggtgagcagttcctggtatcatggtgc

SEQ ID NO: 514 - protein, 944 aa, synthetic construct
  REGION 1..944: note = Variant of the Homo Sapiens Lysosomal alpha-glucosidase
MEWSWVFLFFLSVTTGVHSGHILWHDFSTVPRELSGSSQVLEETHPAHQVGASRPGPRDAQLHPGRPRAVPTQCDVPENSRFDCAPEKAITQEQCEARGCCYIPAKQGLQGAQMGQPWCFFPPSYPSYKLENLSQSEMGYTATLTRTTPSFFPKDILTLRLDVMMETENRLHFTIKDPANRRYEVPLETPHVHSRAPSPLYSVEFSEEPFGVIVRRQLDGRVLLNTTVAPLFFADQFLQLSTSLPSQYITGLAEHLSPLMLSTSWNKITLWNRDLAPTPGANLYGSHPFYLALEDGGSAHGVFLLNSNAMDVVLQPSPALSWRSTGGILDVYIFLGPEPKSVVQQYLDVVGYPFMPPYWGLGFHLCRWGYSSTAITRQVVENMTRAHFPLDVQWNDLDYMDSRRDFTFNKDGFRDFPAMVQELHQGGRRYMMIVDPGISSSGPAGSYRPYDEGLRRGVFITNETGQPLIGKVWPGSTAFPDFTNPIALAWWEDMVAEFHDQVPFDGMWIDMNEPSNFIRGSVDGCPNNELENPPYVPGVVGGTLQAATICASSHQFLSTHYNLHNLYGTTEAIASHRALVKARGTRPFVISRSTFAGHGRYAGHWTGDVWSSWEQLASSVPEILQFNLLGVPLVGADVCGFLGNTSEELCVRWTQLGAFYPFMRNHNSLTSLPQEPYSFSEPAQQAMRKALGLRYALLPHLYTLFHQAHVHGETVARPLFLEFPKDSSTWTVDHQMLWGEALLITPVLQPGKAEVTGYFPLGTWYDLQTVPVEALGSLPPPPAAPREPAIHSEGQWVTLPAPLDTINVHLREGYIIPLQGPGLTTTESRKQPMALAVALTKSGEARGELFWDDGESLEVLERGAYTQVIFEARNNTIVNELVHVTSEGAGLQLGKVTVLGVATAPQQVLSNGRPVSNFTYSPDTKVLDICVALLMGEQFLVSWC

SEQ ID NO: 515 - DNA, 2832 bp, synthetic construct
  misc_feature 1..2832: note = Variant of the Homo Sapiens Lysosomal alpha-glucosidase
  source 1..2832: mol_type = other DNA
atggaatggagctgggtctttctcttcttcctgtcagtaacgactggtgtccactccggacacattctgtggcatgatttttctaccgtgcctagagagctttccggttcaagtcaagtcctcgaagaaacacatccagcccatcaggttggcgcatctaggccgggccctcgggacgctcaactccacccagggagacctagggccgttcccactcagtgcgacgtgccagagaactcacgcttcgattgtgcacctgagaaggctatcacgcaagagcagtgcgaggcccgcggatgttgttacataccggctaaacaggggctgcagggtgcgcagatgggccaaccttggtgcttcttcccaccatcctatccgagttacaagctggagaatctctcccactctgaaatgggatataccgcaacactgactcggaccaccccctccttctttcccaaagatatcttgactctgagacttgacgtaatgatggagacagaaaacaggctccactttaccattaaggaccctgccaatcgccgatacgaggtgcctctggaaacaccacacgtgcacagtagagctccatcacctctgtattctgtcgagttctccgaagagccgtttggcgttatcgtcaggaggcagctcgacgggcgagtgcttctgaacacgactgtggccccgttgttctttgcggatcagtttctgcaactgtcaacaagtctcccttctcagtacattaccgggcttgcagagcatctgtccccactcatgctgagtacttcatggaacaaaatcacactgtggaatagagaccttgctcctactccaggagccaacttgtatggttctcaccctttctacttggccctggaagatggcggatcagcgcatggcgtattcctcctgaattccaacgcaatggacgttgttcttcagccatctcctgctttgagttggagatctacaggcgggatactggacgtctacatctttctgggtccagagcctaaatccgtagtgcagcagtatcttgatgtcgtcggatacccgtttatgccaccatattggggcctggggttccacttgtgccgctggggatattcatccaccgccattacacgacaagttgttgagaatatgaccagggcacattttcctctggatgtacagtggaacgacctggactacatggatagtcgccgcgacttcaccttcaataaggatgggttcagagactttcctgctatggtccaagaacttcaccagggaggcaggaggtacatgatgatcgtagatccgggaatttcttcttctggcccagccggttcatacagaccgtatgacgaaggactgcgacgaggcgtctttatcacgaacgagactggtcagcctttgataggcaaggtttggccagggtccaccgctttcccggatttcacaaatcctgaggcactggcctggtgggaagatatggtcgccgagtttcacgaccaggtcccatttgacgggatgtggatcgacatgaacgagccatccaacttcattagaggaagtgtggatggctgtccgaataatgagctggaaaaccctccttacgtaccaggcgttgttggtgggactcttcaagctgcgacgatttgcgcatcctcccatcagttcctgtcaacccactataacttgcacaatctgtacgggacaacagaggctatcgccagtcatagggccctggtaaaagctagaggaacacgccctttcgttatctctcgctcaacttttgcaggccacggtaggtatgccggacattggaccggcgacgtctggagttcttgggaacagctggcttcctccgttccagagatattgcagtttaacctgttgggagtcccacttgtaggtgcagatgtttgtggcttcctggggaacacctcagaagaattgtgcgtaagatggactcaactgggcgccttctacccttttatgcgcaatcacaactcactgacatctttgcctcaagaaccgtactcatttagtgagccagcacagcaggccatgaggaaggctcttggcctgagatatgcacttctgccgcatctgtacacccttttccaccaggctcatgtccatggagagactgttgcacgacctctgttcttggagttcccaaaagactcttccacgtggacagtcgatcaccagatgctgtggggcgaggctctgctgattacacctgtattgcaacctggtaaggccgaagttaccgggtactttccattggggacctggtatgatctgcaaacagtcccggttgaagctcttggaagtcttccacctccacctgctgcaccaagggagcctgcgatccactctgaaggacagtgggtaactttgcctgcaccgctggacaccatcaatgtccatctgcgcgaaggctacatcataccacttcaaggtcctggactgaccactacagagtctagaaaacaaccaatggctcttgctgttgcactgactaaaagcggcgaagcaaggggtgagctgttctgggacgacggagagtcactggaggtactcgaacgaggcgcgtatacgcaggtcatttttgaggctcgcaataatacgatcgttaacgagctggtccacgtcacttcagaaggtgcaggccttcagttgggcaaggtaactgtcctgggagttgctacagcaccgcagcaggtcttgtccaacggacggcccgtaagcaactttacctatagtcctgataccaaagttctggacatctgcgttgctctgctgatgggtgagcagttcctggtatcatggtgc

SEQ ID NO: 516 - protein, 944 aa, synthetic construct
  REGION 1..944: note = Variant of the Homo Sapiens Lysosomal alpha-glucosidase
MEWSWVFLFFLSVTTGVHSGHILWHDFSTVPRELSGSSQVLEETHPAHQVGASRPGPRDAQLHPGRPRAVPTQCDVPENSRFDCAPEKAITQEQCEARGCCYIPAKQGLQGAQMGQPWCFFPPSYPSYKLENLSHSEMGYTATLTRTTPSFFPKDILTLRLDVMMETENRLHFTIKDPANRRYEVPLETPHVHSRAPSPLYSVEFSEEPFGVIVRRQLDGRVLLNTTVAPLFFADQFLQLSTSLPSQYITGLAEHLSPLMLSTSWNKITLWNRDLAPTPGANLYGSHPFYLALEDGGSAHGVFLLNSNAMDVVLQPSPALSWRSTGGILDVYIFLGPEPKSVVQQYLDVVGYPFMPPYWGLGFHLCRWGYSSTAITRQVVENMTRAHFPLDVQWNDLDYMDSRRDFTFNKDGFRDFPAMVQELHQGGRRYMMIVDPGISSSGPAGSYRPYDEGLRRGVFITNETGQPLIGKVWPGSTAFPDFTNPEALAWWEDMVAEFHDQVPFDGMWIDMNEPSNFIRGSVDGCPNNELENPPYVPGVVGGTLQAATICASSHQFLSTHYNLHNLYGTTEAIASHRALVKARGTRPFVISRSTFAGHGRYAGHWTGDVWSSWEQLASSVPEILQFNLLGVPLVGADVCGFLGNTSEELCVRWTQLGAFYPFMRNHNSLTSLPQEPYSFSEPAQQAMRKALGLRYALLPHLYTLFHQAHVHGETVARPLFLEFPKDSSTWTVDHQMLWGEALLITPVLQPGKAEVTGYFPLGTWYDLQTVPVEALGSLPPPPAAPREPAIHSEGQWVTLPAPLDTINVHLREGYIIPLQGPGLTTTESRKQPMALAVALTKSGEARGELFWDDGESLEVLERGAYTQVIFEARNNTIVNELVHVTSEGAGLQLGKVTVLGVATAPQQVLSNGRPVSNFTYSPDTKVLDICVALLMGEQFLVSWC

SEQ ID NO: 517 - DNA, 2832 bp, synthetic construct
  misc_feature 1..2832: note = Variant of the Homo Sapiens Lysosomal alpha-glucosidase
  source 1..2832: mol_type = other DNA
atggaatggagctgggtctttctcttcttcctgtcagtaacgactggtgtccactccggacacattctgtggcatgatttttctaccgtgcctagagagctttccggttcaagtcaagtcctcgaagaaacacatccagcccatcaggttggcgcatctaggccgggccctcgggacgctcaactccacccagggagacctagggccgttcccactcagtgcgacgtgccagagaactcacgcttcgattgtgcacctgagaaggctatcacgcaagagcagtgcgaggcccgcggatgttgttacataccggctaaacaggggctgcagggtgcgcagatgggccaaccttggtgcttcttcccaccatcctatccgagttacaagctggagaatctctcccagtctgaaatgggatataccgcaacactgactcggaccaccccctccttctttcccaaagatatcttgactctgagacttgacgtaatgatggagacagaaaacaggctccactttaccattaaggaccctgccaatcgccgatacgaggtgcctctggaaacaccacacgtgcacagtagagctccatcacctctgtattctgtcgagttctccgaagagccgtttggcgttatcgtcaggaggcagctcgacgggcgagtgcttctgaacacgactgtggccccgttgttctttgcggatcagtttctgcaactgtcaacaagtctcccttctcagtacattaccgggcttgcagagcatctgtccccactcatgctgagtacttcatggaacaaaatcacactgtggaatagagaccttgctcctactccaggagccaacttgtatggttctcaccctttctacttggccctggaagatggcggatcagcgcatggcgtattcctcctgaattccaacgcaatggacgttgttcttcagccatctcctgctttgagttggagatctacaggcgggatactggacgtctacatctttctgggtccagagcctaaatccgtagtgcagcagtatcttgatgtcgtcggatacccgtttatgccaccatattggggcctggggttccacttgtgccgctggggatattcatccaccgccattacacgacaagttgttgagaatatgaccagggcacattttcctctggatgtacagtggaacgacctggactacatggatagtcgccgcgacttcaccttcaataaggatgggttcagagactttcctgctatggtccaagaacttcaccagggaggcaggaggtacatgatgatcgtagatccgggaatttcttcttctggcccagccggttcatacagaccgtatgacgaaggactgcgacgaggcgtctttatcacgaacgagactggtcagcctttgataggcaaggtttggccagggtccaccgctttcccggatttcacaaatcctgaggcactggcctggtgggaagatatggtcgccgagtttcacgaccaggtcccatttgacgggatgtggatcgacatgaacgagccatccaacttcattagaggaagtgtggatggctgtccgaataatgagctggaaaaccctccttacgtaccaggcgttgttggtgggactcttcaagctgcgacgatttgcgcatcctcccatcagttcctgtcaacccactataacttgcacaatctgtacgggacaacagaggctatcgccagtcatagggccctggtaaaagctagaggaacacgccctttcgttatctctcgctcaacttttgcaggccacggtaggtatgccggacattggaccggcgacgtctggagttcttgggaacagctggcttcctccgttccagagatattgcagtttaacctgttgggagtcccacttgtaggtgcagatgtttgtggcttcctggggaacacctcagaagaattgtgcgtaagatggactcaactgggcgccttctacccttttatgcgcaatcacaactcactgcattctttgcctcaagaaccgtactcatttagtgagccagcacagcaggccatgaggaaggctcttggcctgagatatgcacttctgccgcatctgtacacccttttccaccaggctcatgtccatggagagactgttgcacgacctctgttcttggagttcccaaaagactcttccacgtggacagtcgatcaccagatgctgtggggcgaggctctgctgattacacctgtattgcaacctggtaaggccgaagttaccgggtactttccattggggacctggtatgatctgcaaacagtcccggttgaagctcttggaagtcttccacctccacctgctgcaccaagggagcctgcgatccactctgaaggacagtgggtaactttgcctgcaccgctggacaccatcaatgtccatctgcgcgaaggctacatcataccacttcaaggtcctggactgaccactacagagtctagaaaacaaccaatggctcttgctgttgcactgactaaaagcggcgaagcaaggggtgagctgttctgggacgacggagagtcactggaggtactcgaacgaggcgcgtatacgcaggtcatttttgaggctcgcaataatacgatcgttaacgagctggtccacgtcacttcagaaggtgcaggccttcagttgggcaaggtaactgtcctgggagttgctacagcaccgcagcaggtcttgtccaacggacggcccgtaagcaactttacctatagtcctgataccaaagttctggacatctgcgttgctctgctgatgggtgagcagttcctggtatcatggtgc

SEQ ID NO: 518 - protein, 944 aa, synthetic construct
  REGION 1..944: note = Variant of the Homo Sapiens Lysosomal alpha-glucosidase
MEWSWVFLFFLSVTTGVHSGHILWHDFSTVPRELSGSSQVLEETHPAHQVGASRPGPRDAQLHPGRPRAVPTQCDVPENSRFDCAPEKAITQEQCEARGCCYIPAKQGLQGAQMGQPWCFFPPSYPSYKLENLSQSEMGYTATLTRTTPSFFPKDILTLRLDVMMETENRLHFTIKDPANRRYEVPLETPHVHSRAPSPLYSVEFSEEPFGVIVRRQLDGRVLLNTTVAPLFFADQFLQLSTSLPSQYITGLAEHLSPLMLSTSWNKITLWNRDLAPTPGANLYGSHPFYLALEDGGSAHGVFLLNSNAMDVVLQPSPALSWRSTGGILDVYIFLGPEPKSVVQQYLDVVGYPFMPPYWGLGFHLCRWGYSSTAITRQVVENMTRAHFPLDVQWNDLDYMDSRRDFTFNKDGFRDFPAMVQELHQGGRRYMMIVDPGISSSGPAGSYRPYDEGLRRGVFITNETGQPLIGKVWPGSTAFPDFTNPEALAWWEDMVAEFHDQVPFDGMWIDMNEPSNFIRGSVDGCPNNELENPPYVPGVVGGTLQAATICASSHQFLSTHYNLHNLYGTTEAIASHRALVKARGTRPFVISRSTFAGHGRYAGHWTGDVWSSWEQLASSVPEILQFNLLGVPLVGADVCGFLGNTSEELCVRWTQLGAFYPFMRNHNSLHSLPQEPYSFSEPAQQAMRKALGLRYALLPHLYTLFHQAHVHGETVARPLFLEFPKDSSTWTVDHQMLWGEALLITPVLQPGKAEVTGYFPLGTWYDLQTVPVEALGSLPPPPAAPREPAIHSEGQWVTLPAPLDTINVHLREGYIIPLQGPGLTTTESRKQPMALAVALTKSGEARGELFWDDGESLEVLERGAYTQVIFEARNNTIVNELVHVTSEGAGLQLGKVTVLGVATAPQQVLSNGRPVSNFTYSPDTKVLDICVALLMGEQFLVSWC

SEQ ID NO: 519 - DNA, 2832 bp, synthetic construct
  misc_feature 1..2832: note = Variant of the Homo Sapiens Lysosomal alpha-glucosidase
  source 1..2832: mol_type = other DNA
atggaatggagctgggtctttctcttcttcctgtcagtaacgactggtgtccactccggacacattctgtggcatgatttttctaccgtgcctagagagctttccggttcaagtcaagtcctcgaagaaacacatccagcccatcaggttggcgcatctaggccgggccctcgggacgctcaactccacccagggagacctagggccgttcccactcagtgcgacgtgccagagaactcacgcttcgattgtgcacctgagaaggctatcacgcaagagcagtgcgaggcccgcggatgttgttacataccggctaaacaggggctgcagggtgcgcagatgggccaaccttggtgcttcttcccaccatcctatccgagttacaagctggagaatctctcccagtctgaaatgggatataccgcaacactgactcggaccaccccctccttctttcccaaagatatcttgactctgagacttgacgtaatgatggagacagaaaacaggctccactttaccattaaggaccctgccaatcgccgatacgaggtgcctctggaaacaccacacgtgcacagtagagctccatcacctctgtattctgtcgagttctccgaagagccgtttggcgttatcgtcaggaggcagctcgacgggcgagtgcttctgaacacgactgtggccccgttgttctttgcggatcagtttctgcaactgtcaacaagtctcccttctcagtacattaccgggcttgcagagcatctgtccccactcatgctgagtacttcatggaacaaaatcacactgtggaatagagaccttgctcctactccaggagccaacttgtatggttctcaccctttctacttggccctggaagatggcggatcagcgcatggcgtattcctcctgaattccaacgcaatggacgttgttcttcagccatctcctgctttgagttggagatctacaggcgggatactggacgtctacatctttctgggtccagagcctaaatccgtagtgcagcagtatcttgatgtcgtcggatacccgtttatgccaccatattggggcctggggttccacttgtgccgctggggatattcatccaccgccattacacgacaagttgttgagaatatgaccagggcacattttcctctggatgtacagtggaacgacctggactacatggatagtcgccgcgacttcaccttcaataaggatgggttcagagactttcctgctatggtccaagaacttcaccagggaggcaggaggtacatgatgatcgtagatccgggaatttcttcttctggcccagccggttcatacagaccgtatgacgaaggactgcgacgaggcgtctttatcacgaacgagactggtcagcctttgataggcaaggtttggccagggtccaccgctttcccggatttcacaaatcctgaggcactggcctggtgggaagatatggtcgccgagtttcacgaccaggtcccatttgacgggatgtggatcgacatgaacgagccatccaacttcattagaggaagtaacgatggctgtccgaataatgagctggaaaaccctccttacgtaccaggcgttgttggtgggactcttcaagctgcgacgatttgcgcatcctcccatcagttcctgtcaacccactataacttgcacaatctgtacgggacaacagaggctatcgccagtcatagggccctggtaaaagctagaggaacacgccctttcgttatctctcgctcaacttttgcaggccacggtaggtatgccggacattggaccggcgacgtctggagttcttgggaacagctggcttcctccgttccagagatattgcagtttaacctgttgggagtcccacttgtaggtgcagatgtttgtggcttcctggggaacacctcagaagaattgtgcgtaagatggactcaactgggcgccttctacccttttatgcgcaatcacaactcactgacatctttgcctcaagaaccgtactcatttagtgagccagcacagcaggccatgaggaaggctcttggcctgagatatgcacttctgccgcatctgtacacccttttccaccaggctcatgtccatggagagactgttgcacgacctctgttcttggagttcccaaaagactcttccacgtggacagtcgatcaccagatgctgtggggcgaggctctgctgattacacctgtattgcaacctggtaaggccgaagttaccgggtactttccattggggacctggtatgatctgcaaacagtcccggttgaagctcttggaagtcttccacctccacctgctgcaccaagggagcctgcgatccactctgaaggacagtgggtaactttgcctgcaccgctggacaccatcaatgtccatctgcgcgaaggctacatcataccacttcaaggtcctggactgaccactacagagtctagaaaacaaccaatggctcttgctgttgcactgactaaaagcggcgaagcaaggggtgagctgttctgggacgacggagagtcactggaggtactcgaacgaggcgcgtatacgcaggtcatttttgaggctcgcaataatacgatcgttaacgagctggtccacgtcacttcagaaggtgcaggccttcagttgggcaaggtaactgtcctgggagttgctacagcaccgcagcaggtcttgtccaacggacggcccgtaagcaactttacctatagtcctgataccaaagttctggacatctgcgttgctctgctgatgggtgagcagttcctggtatcatggtgc

SEQ ID NO: 520 - protein, 944 aa, synthetic construct
  REGION 1..944: note = Variant of the Homo Sapiens Lysosomal alpha-glucosidase
MEWSWVFLFFLSVTTGVHSGHILWHDFSTVPRELSGSSQVLEETHPAHQVGASRPGPRDAQLHPGRPRAVPTQCDVPENSRFDCAPEKAITQEQCEARGCCYIPAKQGLQGAQMGQPWCFFPPSYPSYKLENLSQSEMGYTATLTRTTPSFFPKDILTLRLDVMMETENRLHFTIKDPANRRYEVPLETPHVHSRAPSPLYSVEFSEEPFGVIVRRQLDGRVLLNTTVAPLFFADQFLQLSTSLPSQYITGLAEHLSPLMLSTSWNKITLWNRDLAPTPGANLYGSHPFYLALEDGGSAHGVFLLNSNAMDVVLQPSPALSWRSTGGILDVYIFLGPEPKSVVQQYLDVVGYPFMPPYWGLGFHLCRWGYSSTAITRQVVENMTRAHFPLDVQWNDLDYMDSRRDFTFNKDGFRDFPAMVQELHQGGRRYMMIVDPGISSSGPAGSYRPYDEGLRRGVFITNETGQPLIGKVWPGSTAFPDFTNPEALAWWEDMVAEFHDQVPFDGMWIDMNEPSNFIRGSNDGCPNNELENPPYVPGVVGGTLQAATICASSHQFLSTHYNLHNLYGTTEAIASHRALVKARGTRPFVISRSTFAGHGRYAGHWTGDVWSSWEQLASSVPEILQFNLLGVPLVGADVCGFLGNTSEELCVRWTQLGAFYPFMRNHNSLTSLPQEPYSFSEPAQQAMRKALGLRYALLPHLYTLFHQAHVHGETVARPLFLEFPKDSSTWTVDHQMLWGEALLITPVLQPGKAEVTGYFPLGTWYDLQTVPVEALGSLPPPPAAPREPAIHSEGQWVTLPAPLDTINVHLREGYIIPLQGPGLTTTESRKQPMALAVALTKSGEARGELFWDDGESLEVLERGAYTQVIFEARNNTIVNELVHVTSEGAGLQLGKVTVLGVATAPQQVLSNGRPVSNFTYSPDTKVLDICVALLMGEQFLVSWC

SEQ ID NO: 521 - DNA, 2832 bp, synthetic construct
  misc_feature 1..2832: note = Variant of the Homo Sapiens Lysosomal alpha-glucosidase
  source 1..2832: mol_type = other DNA
atggaatggagctgggtctttctcttcttcctgtcagtaacgactggtgtccactccggacacattctgtggcatgatttttctaccgtgcctagagagctttccggttcaagtcaagtcctcgaagaaacacatccagcccatcaggttggcgcatctaggccgggccctcgggacgctcaactccacccagggagacctagggccgttcccactcagtgcgacgtgccagagaactcacgcttcgattgtgcacctgagaaggctatcacgcaagagcagtgcgaggcccgcggatgttgttacataccggctaaacaggggctgcagggtgcgcagatgggccaaccttggtgcttcttcccaccatcctatccgagttacaagctggagaatctctcccagtctgaaatgggatataccgcaacactgactcggaccaccccctccttctttcccaaagatatcttgactctgagacttgacgtaatgatggagacagaaaacaggctccactttaccattaaggaccctgccaatcgccgatacgaggtgcctctggaaacaccacacgtgcacagtagagctccatcacctctgtattctgtcgagttctccgaagagccgtttggcgttatcgtcaggaggcagctcgacgggcgagtgcttctgaacacgactgtggccccgttgttctttgcggatcagtttctgcaactgtcaacaagtctcccttctcagtacattaccgggcttgcagagcatctgtccccactcatgctgagtacttcatggaacaaaatcacactgtggaatagagaccttgctcctactccaggagccaacttgtatggttctcaccctttctacttggccctggaagatggcggatcagcgcatggcgtattcctcctgaattccaacgcaatggacgttgttcttcagccatctcctgctttgagttggagatctacaggcgggatactggacgtctacatctttctgggtccagagcctaaatccgtagtgcagcagtatcttgatgtcgtcggatacccgtttatgccaccatattggggcctggggttccacttgtgccgctggggatattcatccaccgccattacacgacaagttgttgagaatatgaccagggcacattttcctctggatgtacagtggaacgacctggactacatggatagtcgccgcgacttcaccttcaataaggatgggttcagagactttcctgctatggtccaagaacttcaccagggaggcaggaggtacatgatgatcgtagatccgggaatttcttcttctggcccagccggttcatacagaccgtatgacgaaggactgcgacgaggcgtctttatcacgaacgagactggtcagcctttgataggcaaggtttggccagggtccaccgctttcccggatttcacaaatcctgaggcactggcctggtgggaagatatggtcgccgagtttcacgaccaggtcccatttgacgggatgtggatcgacatgaacgagccatccaacttcattagaggaagtgtggatggctgtccgaataatgagctggaaaaccctccttacgtaccaggcgttgttggtgggactcttcaagctgcgacgatttgcgcatcctcccatcagttcctgtcaacccactataacttgcacaatctgtacgggacaacagaggctatcgccagtcatagggccctggtaaaagctagaggaacacgccctttcgttatctctcgctcaacttttgcaggccacggtaggtatgccggacattggaccggcgacgtctggagttcttgggaacagctggcttcctccgttccagagatattgcagtttaacctgttgggagtcccacttgtaggtgcagatgtttgtggcttcctggggaacacctcagaagaattgtgcgtaagatggactcaactgggcgccttctacccttttatgcgcaatcacaactcactgacatctttgcctcaagaaccgtactcatttagtgagccagcacagcaggccatgaggaaggctcttggcctgagatatgcacttctgccgcatctgtacacccttttccaccaggctcatgtccatggagagactgttgcacgacctctgttcttggagttcccaaaagactcttccacgtggacagtcgatcaccagatgctgtggggcgaggctctgctgattacacctgtattgcaacctggtaaggccgaagttaccgggtactttccattggggacctggtatgatctgcaaacagtcccggttgaagctcttggaagtcttccacctccacctgctgcaccaagggagcctgcgatccactctgaaggacagtgggtaactttgcctgcaccgctggacaccatcaatgtccatctgcgcgaaggctacatcataccacttcaaggtcctggactgaccactacagagtctagaaaacaaccaatggctcttgctgttgcactgactaaaagcggcgaagcaaggggtgagctgttctgggacgacggagagtcactggaggtactcgaacgaggcgcgtatacgcaggtcatttttgaggctcgcaataatacgatcgttaacgagctggtccacgtcacttcagaaggtgcaggccttcagttggagaaggtaactgtcctgggagttgctacagcaccgcagcaggtcttgtccaacggacggcccgtaagcaactttacctatagtcctgataccaaagttctggacatctgcgttgctctgctgatgggtgagcagttcctggtatcatggtgc

SEQ ID NO: 522 - protein, 944 aa, synthetic construct
  REGION 1..944: note = Variant of the Homo Sapiens Lysosomal alpha-glucosidase
MEWSWVFLFFLSVTTGVHSGHILWHDFSTVPRELSGSSQVLEETHPAHQVGASRPGPRDAQLHPGRPRAVPTQCDVPENSRFDCAPEKAITQEQCEARGCCYIPAKQGLQGAQMGQPWCFFPPSYPSYKLENLSQSEMGYTATLTRTTPSFFPKDILTLRLDVMMETENRLHFTIKDPANRRYEVPLETPHVHSRAPSPLYSVEFSEEPFGVIVRRQLDGRVLLNTTVAPLFFADQFLQLSTSLPSQYITGLAEHLSPLMLSTSWNKITLWNRDLAPTPGANLYGSHPFYLALEDGGSAHGVFLLNSNAMDVVLQPSPALSWRSTGGILDVYIFLGPEPKSVVQQYLDVVGYPFMPPYWGLGFHLCRWGYSSTAITRQVVENMTRAHFPLDVQWNDLDYMDSRRDFTFNKDGFRDFPAMVQELHQGGRRYMMIVDPGISSSGPAGSYRPYDEGLRRGVFITNETGQPLIGKVWPGSTAFPDFTNPEALAWWEDMVAEFHDQVPFDGMWIDMNEPSNFIRGSVDGCPNNELENPPYVPGVVGGTLQAATICASSHQFLSTHYNLHNLYGTTEAIASHRALVKARGTRPFVISRSTFAGHGRYAGHWTGDVWSSWEQLASSVPEILQFNLLGVPLVGADVCGFLGNTSEELCVRWTQLGAFYPFMRNHNSLTSLPQEPYSFSEPAQQAMRKALGLRYALLPHLYTLFHQAHVHGETVARPLFLEFPKDSSTWTVDHQMLWGEALLITPVLQPGKAEVTGYFPLGTWYDLQTVPVEALGSLPPPPAAPREPAIHSEGQWVTLPAPLDTINVHLREGYIIPLQGPGLTTTESRKQPMALAVALTKSGEARGELFWDDGESLEVLERGAYTQVIFEARNNTIVNELVHVTSEGAGLQLEKVTVLGVATAPQQVLSNGRPVSNFTYSPDTKVLDICVALLMGEQFLVSWC

SEQ ID NO: 523 - DNA, 2832 bp, synthetic construct
  misc_feature 1..2832: note = Variant of the Homo Sapiens Lysosomal alpha-glucosidase
  source 1..2832: mol_type = other DNA
atggaatggagctgggtctttctcttcttcctgtcagtaacgactggtgtccactccggacacattctgtggcatgatttttctaccgtgcctagagagctttccggttcaagtcaagtcctcgaagaaacacatccagcccatcaggttggcgcatctaggccgggccctcgggacgctcaactccacccagggagacctagggccgttcccactcagtgcgacgtgccagagaactcacgcttcgattgtgcacctgagaaggctatcacgcaagagcagtgcgaggcccgcggatgttgttacataccggctaaacaggggctgcagggtgcgcagatgggccaaccttggtgcttcttcccaccatcctatccgagttacaagctggagaatctctcccagtctgaaatgggatataccgcaacactgactcggaccaccccctccttctttcccaaagatatcttgactctgagacttgacgtaatgatggagacagaaaacaggctccactttaccattaaggaccctgccaatcgccgatacgaggtgcctctggaaacaccacacgtgcacagtagagctccatcacctctgtattctgtcgagttctccgaagagccgtttggcgttatcgtcaggaggcagctcgacgggcgagtgcttctgaacacgactgtggccccgttgttctttgcggatcagtttctgcaactgtcaacaagtctcccttctcagtacattaccgggcttgcagagcatctgtccccactcatgctgagtacttcatggaacaaaatcacactgtggaatagagaccttgctcctactccaggagccaacttgtatggttctcaccctttctacttggccctggaagatggcggatcagcgcatggcgtattcctcctgaattccaacgcaatggacgttgttcttcagccatctcctgctttgagttggagatctacaggcgggatactggacgtctacatctttctgggtccagagcctaaatccgtagtgcagcagtatcttgatgtcgtcggatacccgtttatgccaccatattggggcctggggttccacttgtgccgctggggatattcatccaccgccattacacgacaagttgttgagaatatgaccagggcacattttcctctggatgtacagtggaacgacctggactacatggatagtcgccgcgacttcaccttcaataaggatgggttcagagactttcctgctatggtccaagaacttcaccagggaggcaggaggtacatgatgatcgtagatccgggaatttcttcttctggcccagccggttcatacagaccgtatgacgaaggactgcgacgaggcgtctttatcacgaacgagactggtcagcctttgataggcaaggtttggccagggtccaccgctttcccggatttcacaaatcctgaggcactggcctggtgggaagatatggtcgccgagtttcacgaccaggtcccatttgacgggatgtggatcgacatgaacgagccatccaacttcattagaggaagtgtggatggctgtccgaataatgagctggaaaaccctccttacgtaccaggcgttgttggtgggactcttcaagctgcgacgatttgcgcatcctcccatcagttcctgtcaacccactataacttgcacaatctgtacgggacaacagaggctatcgccagtcatagggccctggtaaaagctagaggaacacgccctttcgttatctctcgctcaacttttgcaggccacggtaggtatgccggacattggaccggcgacgtctggagttcttgggaacagctggcttcctccgttccagagatattgcagtttaacctgttgggagtcccacttgtaggtgcagatgtttgtggcttcctggggaacacctcagaagaattgtgcgtaagatggactcaactgggcgccttctacccttttatgcgcaatcacaactcactgacatctttgcctcaagaaccgtactcatttagtgagccagcacagcaggccatgaggaaggctcttggcctgagatatgcacttctgccgcatctgtacacccttttccaccaggctcatgtccatggagagactgttgcacgacctctgttcttggagttcccaaaagactcttccacgtggacagtcgatcaccagatgctgtggggcgaggctctgctgattacacctgtattgcaacctggtaaggccgaagttaccgggtactttccattggggacctggtatgatctgcaaacagtcccggttgaagctcttggaagtcttccacctccacctgctgcaccaagggagcctgcgatccactctgaaggacagtgggtaactttgcctgcaccgctggacaccatcaatgtccatctgcgcgaaggctacatcataccacttcaaggtcctggactgaccactacagagtctagaaaacaaccaatggctcttgctgttgcactgactaaaagcggcgaagcaaggggtgagctgttctgggacgacggagagtcactggaggtactcgaacgaggcgcgtatacgcaggtcatttttcaagctcgcaataatacgatcgttaacgagctggtccacgtcacttcagaaggtgcaggccttcagttgggcaaggtaactgtcctgggagttgctacagcaccgcagcaggtcttgtccaacggacggcccgtaagcaactttacctatagtcctgataccaaagttctggacatctgcgttgctctgctgatgggtgagcagttcctggtatcatggtgc

SEQ ID NO: 524 - protein, 944 aa, synthetic construct
  REGION 1..944: note = Variant of the Homo Sapiens Lysosomal alpha-glucosidase
MEWSWVFLFFLSVTTGVHSGHILWHDFSTVPRELSGSSQVLEETHPAHQVGASRPGPRDAQLHPGRPRAVPTQCDVPENSRFDCAPEKAITQEQCEARGCCYIPAKQGLQGAQMGQPWCFFPPSYPSYKLENLSQSEMGYTATLTRTTPSFFPKDILTLRLDVMMETENRLHFTIKDPANRRYEVPLETPHVHSRAPSPLYSVEFSEEPFGVIVRRQLDGRVLLNTTVAPLFFADQFLQLSTSLPSQYITGLAEHLSPLMLSTSWNKITLWNRDLAPTPGANLYGSHPFYLALEDGGSAHGVFLLNSNAMDVVLQPSPALSWRSTGGILDVYIFLGPEPKSVVQQYLDVVGYPFMPPYWGLGFHLCRWGYSSTAITRQVVENMTRAHFPLDVQWNDLDYMDSRRDFTFNKDGFRDFPAMVQELHQGGRRYMMIVDPGISSSGPAGSYRPYDEGLRRGVFITNETGQPLIGKVWPGSTAFPDFTNPEALAWWEDMVAEFHDQVPFDGMWIDMNEPSNFIRGSVDGCPNNELENPPYVPGVVGGTLQAATICASSHQFLSTHYNLHNLYGTTEAIASHRALVKARGTRPFVISRSTFAGHGRYAGHWTGDVWSSWEQLASSVPEILQFNLLGVPLVGADVCGFLGNTSEELCVRWTQLGAFYPFMRNHNSLTSLPQEPYSFSEPAQQAMRKALGLRYALLPHLYTLFHQAHVHGETVARPLFLEFPKDSSTWTVDHQMLWGEALLITPVLQPGKAEVTGYFPLGTWYDLQTVPVEALGSLPPPPAAPREPAIHSEGQWVTLPAPLDTINVHLREGYIIPLQGPGLTTTESRKQPMALAVALTKSGEARGELFWDDGESLEVLERGAYTQVIFQARNNTIVNELVHVTSEGAGLQLGKVTVLGVATAPQQVLSNGRPVSNFTYSPDTKVLDICVALLMGEQFLVSWC

SEQ ID NO: 525 - DNA, 2832 bp, synthetic construct
  misc_feature 1..2832: note = Variant of the Homo Sapiens Lysosomal alpha-glucosidase
  source 1..2832: mol_type = other DNA
atggaatggagctgggtctttctcttcttcctgtcagtaacgactggtgtccactccggacacattctgtggcatgattttgagaccgtgcctagagagctttccggttcaagtcaagtcctcgaagaaacacatccagcccatcaggttggcgcatctaggccgggccctcgggacgctcaactccacccagggagacctagggccgttcccactcagtgcgacgtgccagagaactcacgcttcgattgtgcacctgagaaggctatcacgcaagagcagtgcgaggcccgcggatgttgttacataccggctaaacaggggctgcagggtgcgcagatgggccaaccttggtgcttcttcccaccatcctatccgagttacaagctggagaatctctcccagtctgaaatgggatataccgcaacactgactcggaccaccccctccttctttcccaaagatatcttgactctgagacttgacgtaatgatggagacagaaaacaggctccactttaccattaaggaccctgccaatcgccgatacgaggtgcctctggaaacaccacacgtgcacagtagagctccatcacctctgtattctgtcgagttctccgaagagccgtttggcgttatcgtcaggaggcagctcgacgggcgagtgcttctgaacacgactgtggccccgttgttctttgcggatcagtttctgcaactgtcaacaagtctcccttctcagtacattaccgggcttgcagagcatctgtccccactcatgctgagtacttcatggaacaaaatcacactgtggaatagagaccttgctcctactccaggagccaacttgtatggttctcaccctttctacttggccctggaagatggcggatcagcgcatggcgtattcctcctgaattccaacgcaatggacgttgttcttcagccatctcctgctttgagttggagatctacaggcgggatactggacgtctacatctttctgggtccagagcctaaatccgtagtgcagcagtatcttgatgtcgtcggatacccgtttatgccaccatattggggcctggggttccacttgtgccgctggggatattcatccaccgccattacacgacaagttgttgagaatatgaccagggcacattttcctctggatgtacagtggaacgacctggactacatggatagtcgccgcgacttcaccttcaataaggatgggttcagagactttcctgctatggtccaagaacttcaccagggaggcaggaggtacatgatgatcgtagatccgggaatttcttcttctggcccagccggttcatacagaccgtatgacgaaggactgcgacgaggcgtctttatcacgaacgagactggtcagcctttgataggcaaggtttggccagggtccaccgctttcccggatttcacaaatcctgaggcactggcctggtgggaagatatggtcgccgagtttcacgaccaggtcccatttgacgggatgtggatcgacatgaacgagccatccaacttcattagaggaagtgtggatggctgtccgaataatgagctggaaaaccctccttacgtaccaggcgttgttggtgggactcttcaagctgcgacgatttgcgcatcctcccatcagttcctgtcaacccactataacttgcacaatctgtacgggacaacagaggctatcgccagtcatagggccctggtaaaagctagaggaacacgccctttcgttatctctcgctcaacttttgcaggccacggtaggtatgccggacattggaccggcgacgtctggagttcttgggaacagctggcttcctccgttccagagatattgcagtttaacctgttgggagtcccacttgtaggtgcagatgtttgtggcttcctggggaacacctcagaagaattgtgcgtaagatggactcaactgggcgccttctacccttttatgcgcaatcacaactcactgacatctttgcctcaagaaccgtactcatttagtgagccagcacagcaggccatgaggaaggctcttggcctgagatatgcacttctgccgcatctgtacacccttttccaccaggctcatgtccatggagagactgttgcacgacctctgttcttggagttcccaaaagactcttccacgtggacagtcgatcaccagatgctgtggggcgaggctctgctgattacacctgtattgcaacctggtaaggccgaagttaccgggtactttccattggggacctggtatgatctgcaaacagtcccggttgaagctcttggaagtcttccacctccacctgctgcaccaagggagcctgcgatccactctgaaggacagtgggtaactttgcctgcaccgctggacaccatcaatgtccatctgcgcgaaggctacatcataccacttcaaggtcctggactgaccactacagagtctagaaaacaaccaatggctcttgctgttgcactgactaaaagcggcgaagcaaggggtgagctgttctgggacgacggagagtcactggaggtactcgaacgaggcgcgtatacgcaggtcatttttgaggctcgcaataatacgatcgttaacgagctggtccacgtcacttcagaaggtgcaggccttcagttgggcaaggtaactgtcctgggagttgctacagcaccgcagcaggtcttgtccaacggacggcccgtaagcaactttacctatagtcctgataccaaagttctggacatctgcgttgctctgctgatgggtgagcagttcctggtatcatggtgc

SEQ ID NO: 526 - protein, 944 aa, synthetic construct
  REGION 1..944: note = Variant of the Homo Sapiens Lysosomal alpha-glucosidase
MEWSWVFLFFLSVTTGVHSGHILWHDFETVPRELSGSSQVLEETHPAHQVGASRPGPRDAQLHPGRPRAVPTQCDVPENSRFDCAPEKAITQEQCEARGCCYIPAKQGLQGAQMGQPWCFFPPSYPSYKLENLSQSEMGYTATLTRTTPSFFPKDILTLRLDVMMETENRLHFTIKDPANRRYEVPLETPHVHSRAPSPLYSVEFSEEPFGVIVRRQLDGRVLLNTTVAPLFFADQFLQLSTSLPSQYITGLAEHLSPLMLSTSWNKITLWNRDLAPTPGANLYGSHPFYLALEDGGSAHGVFLLNSNAMDVVLQPSPALSWRSTGGILDVYIFLGPEPKSVVQQYLDVVGYPFMPPYWGLGFHLCRWGYSSTAITRQVVENMTRAHFPLDVQWNDLDYMDSRRDFTFNKDGFRDFPAMVQELHQGGRRYMMIVDPGISSSGPAGSYRPYDEGLRRGVFITNETGQPLIGKVWPGSTAFPDFTNPEALAWWEDMVAEFHDQVPFDGMWIDMNEPSNFIRGSVDGCPNNELENPPYVPGVVGGTLQAATICASSHQFLSTHYNLHNLYGTTEAIASHRALVKARGTRPFVISRSTFAGHGRYAGHWTGDVWSSWEQLASSVPEILQFNLLGVPLVGADVCGFLGNTSEELCVRWTQLGAFYPFMRNHNSLTSLPQEPYSFSEPAQQAMRKALGLRYALLPHLYTLFHQAHVHGETVARPLFLEFPKDSSTWTVDHQMLWGEALLITPVLQPGKAEVTGYFPLGTWYDLQTVPVEALGSLPPPPAAPREPAIHSEGQWVTLPAPLDTINVHLREGYIIPLQGPGLTTTESRKQPMALAVALTKSGEARGELFWDDGESLEVLERGAYTQVIFEARNNTIVNELVHVTSEGAGLQLGKVTVLGVATAPQQVLSNGRPVSNFTYSPDTKVLDICVALLMGEQFLVSWC

SEQ ID NO: 527 - DNA, 2832 bp, synthetic construct
  misc_feature 1..2832: note = Variant of the Homo Sapiens Lysosomal alpha-glucosidase
  source 1..2832: mol_type = other DNA
atggaatggagctgggtctttctcttcttcctgtcagtaacgactggtgtccactccggacacattctgtggcatgatttttctaccgtgcctagagagctttccggttcaagtcaagtcctcgaagaaacacatccagcccatcaggttggcgcatctaggccgggccctcgggacgctcaactccacccagggagacctagggccgttcccactcagtgcgacgtgccagagaactcacgcttcgattgtgcacctgagaaggctatcacgcaagagcagtgcgaggcccgcggatgttgttacataccggctaaacaggggctgcagggtgcgcagatgggccaaccttggtgcttcttcccaccatcctatccgagttacaagctggagaatctctcccagtctgaaatgggatataccgcaacactgactcggaccaccccctccttctttcccaaagatatcttgactctgagacttgacgtaatgatggagacagaaaacaggctccactttaccattaaggaccctgccaatcgccgatacgaggtgcctctggaaacaccacacgtgcacagtagagctccatcacctctgtattctgtcgagttctccgaagagccgtttggcgttatcgtcaggaggcagctcgacgggcgagtgcttctgaacacgactgtggccccgttgttctttgcggatcagtttctgcaactgtcaacaagtctcccttctcagtacattaccgggcttgcagagcatctgtccccactcatgctgagtacttcatggaacaaaatcacactgtggaatagagaccttgctcctactccaggagccaacttgtatggttctcaccctttctacttggccctggaagatggcggatcagcgcatggcgtattcctcctgaattccaacgcaatggacgttgttcttcagccatctcctgctttgagttggagatctacaggcgggatactggacgtctacatctttctgggtccagagcctaaatccgtagtgcagcagtatcttgatgtcgtcggatacccgtttatgccaccatattggggcctggggttccacttgtgccgctggggatattcatccaccgccattacacgacaagttgttgagaatatgaccagggcacattttcctctggatgtacagtggaacgacctggactacatggatagtcgccgcgacttcaccttcaataaggatgggttcagagactttcctgctatggtccaagaacttcaccagggaggcaggaggtacatgatgatcgtagatccgggaatttcttcttctggcccagccggttcatacagaccgtatgacgaaggactgcgacgaggcgtctttatcacgaacgagactggtcagcctttgataggcaaggtttggccagggtccaccgctttcccggatttcacaaatcctgaggcactggcctggtgggaagatatggtcgccgagtttcacgaccaggtcccatttgacgggatgtggatcgacatgaacgagccatccaacttcattagaggaagtgtggatggctgtccgaataatgagctggaaaaccctccttacgtaccaggcgttgttggtgggactcttcaagctgcgacgatttgcgcatcctcccatcagttcctgtcaacccactataacttgcacaatctgtacgggacaacagaggctatcgccagtcatagggccctggtaaaagctagaggaacacgccctttcgttatctctcgctcaacttttgcaggccacggtaggtatgccggacattggaccggcgacgtctggagttcttgggaacagctggcttcctccgttccagagatattgcagtttaacctgttgggagtcccacttgtaggtgcagatgtttgtggcttcctggggaacacctcagaagaattgtgcgtaagatggactcaactgggcgccttctacccttttatgcgcaatcacaactcactgacatctttgcctcaagaaccgtactcatttagtgagccagcacagcaggccatgaggaaggctcttggcctgagatatgcacttctgccgcatctgtacacccttttccaccaggctcatgtccatggagagactgttgcacgacctctgttcttggagttcccaaaagactcttccacgtggacagtcgatcaccagatgctgtggggcgaggctctgctgattacacctgtattgcaacctggtaaggccgaagttaccgggtactttccattggggacctggtatgatctgcaaacagtcccggttgaagctcttggaagtcttccacctccacctgctgcaccaagggagcctgcgatccactctgaaggacagtgggtaactttgcctgcaccgctggacaccatcaatgtccatctgcgcgaaggctacatcataccacttcaaggtcctggactgaccactacagagtctagaaaacaaccaatggctcttgctgttgcactgactaaaaatggcgaagcaaggggtgagctgttctgggacgacggagagtcactggaggtactcgaacgaggcgcgtatacgcaggtcatttttgaggctcgcaataatacgatcgttaacgagctggtccacgtcacttcagaaggtgcaggccttcagttgggcaaggtaactgtcctgggagttgctacagcaccgcagcaggtcttgtccaacggacggcccgtaagcaactttacctatagtcctgataccaaagttctggacatctgcgttgctctgctgatgggtgagcagttcctggtatcatggtgc

SEQ ID NO: 528 - protein, 944 aa, synthetic construct
  REGION 1..944: note = Variant of the Homo Sapiens Lysosomal alpha-glucosidase
MEWSWVFLFFLSVTTGVHSGHILWHDFSTVPRELSGSSQVLEETHPAHQVGASRPGPRDAQLHPGRPRAVPTQCDVPENSRFDCAPEKAITQEQCEARGCCYIPAKQGLQGAQMGQPWCFFPPSYPSYKLENLSQSEMGYTATLTRTTPSFFPKDILTLRLDVMMETENRLHFTIKDPANRRYEVPLETPHVHSRAPSPLYSVEFSEEPFGVIVRRQLDGRVLLNTTVAPLFFADQFLQLSTSLPSQYITGLAEHLSPLMLSTSWNKITLWNRDLAPTPGANLYGSHPFYLALEDGGSAHGVFLLNSNAMDVVLQPSPALSWRSTGGILDVYIFLGPEPKSVVQQYLDVVGYPFMPPYWGLGFHLCRWGYSSTAITRQVVENMTRAHFPLDVQWNDLDYMDSRRDFTFNKDGFRDFPAMVQELHQGGRRYMMIVDPGISSSGPAGSYRPYDEGLRRGVFITNETGQPLIGKVWPGSTAFPDFTNPEALAWWEDMVAEFHDQVPFDGMWIDMNEPSNFIRGSVDGCPNNELENPPYVPGVVGGTLQAATICASSHQFLSTHYNLHNLYGTTEAIASHRALVKARGTRPFVISRSTFAGHGRYAGHWTGDVWSSWEQLASSVPEILQFNLLGVPLVGADVCGFLGNTSEELCVRWTQLGAFYPFMRNHNSLTSLPQEPYSFSEPAQQAMRKALGLRYALLPHLYTLFHQAHVHGETVARPLFLEFPKDSSTWTVDHQMLWGEALLITPVLQPGKAEVTGYFPLGTWYDLQTVPVEALGSLPPPPAAPREPAIHSEGQWVTLPAPLDTINVHLREGYIIPLQGPGLTTTESRKQPMALAVALTKNGEARGELFWDDGESLEVLERGAYTQVIFEARNNTIVNELVHVTSEGAGLQLGKVTVLGVATAPQQVLSNGRPVSNFTYSPDTKVLDICVALLMGEQFLVSWC

SEQ ID NO: 529 - DNA, 2832 bp, synthetic construct
  misc_feature 1..2832: note = Variant of the Homo Sapiens Lysosomal alpha-glucosidase
  source 1..2832: mol_type = other DNA
atggaatggagctgggtctttctcttcttcctgtcagtaacgactggtgtccactccggacacattctgtggcatgatttttctaccgtgcctagagagctttccggttcaagtcaagtcctcgaagaaacacatccagcccatcaggttggcgcatctaggccgggccctcgggacgctcaactccacccagggagacctagggccgttcccactcagtgcgacgtgccacataactcacgcttcgattgtgcacctgagaaggctatcacgcaagagcagtgcgaggcccgcggatgttgttacataccggctaaacaggggctgcagggtgcgcagatgggccaaccttggtgcttcttcccaccatcctatccgagttacaagctggagaatctctcccagtctgaaatgggatataccgcaacactgactcggaccaccccctccttctttcccaaagatatcttgactctgagacttgacgtaatgatggagacagaaaacaggctccactttaccattaaggaccctgccaatcgccgatacgaggtgcctctggaaacaccacacgtgcacagtagagctccatcacctctgtattctgtcgagttctccgaagagccgtttggcgttatcgtcaggaggcagctcgacgggcgagtgcttctgaacacgactgtggccccgttgttctttgcggatcagtttctgcaactgtcaacaagtctcccttctcagtacattaccgggcttgcagagcatctgtccccactcatgctgagtacttcatggaacaaaatcacactgtggaatagagaccttgctcctactccaggagccaacttgtatggttctcaccctttctacttggccctggaagatggcggatcagcgcatggcgtattcctcctgaattccaacgcaatggacgttgttcttcagccatctcctgctttgagttggagatctacaggcgggatactggacgtctacatctttctgggtccagagcctaaatccgtagtgcagcagtatcttgatgtcgtcggatacccgtttatgccaccatattggggcctggggttccacttgtgccgctggggatattcatccaccgccattacacgacaagttgttgagaatatgaccagggcacattttcctctggatgtacagtggaacgacctggactacatggatagtcgccgcgacttcaccttcaataaggatgggttcagagactttcctgctatggtccaagaacttcaccagggaggcaggaggtacatgatgatcgtagatccgggaatttcttcttctggcccagccggttcatacagaccgtatgacgaaggactgcgacgaggcgtctttatcacgaacgagactggtcagcctttgataggcaaggtttggccagggtccaccgctttcccggatttcacaaatcctgaggcactggcctggtgggaagatatggtcgccgagtttcacgaccaggtcccatttgacgggatgtggatcgacatgaacgagccatccaacttcattagaggaagtgtggatggctgtccgaataatgagctggaaaaccctccttacgtaccaggcgttgttggtgggactcttcaagctgcgacgatttgcgcatcctcccatcagttcctgtcaacccactataacttgcacaatctgtacgggacaacagaggctatcgccagtcatagggccctggtaaaagctagaggaacacgccctttcgttatctctcgctcaacttttgcaggccacggtaggtatgccggacattggaccggcgacgtctggagttcttgggaacagctggcttcctccgttccagagatattgcagtttaacctgttgggagtcccacttgtaggtgcagatgtttgtggcttcctggggaacacctcagaagaattgtgcgtaagatggactcaactgggcgccttctacccttttatgcgcaatcacaactcactgacatctttgcctcaagaaccgtactcatttagtgagccagcacagcaggccatgaggaaggctcttggcctgagatatgcacttctgccgcatctgtacacccttttccaccaggctcatgtccatggagagactgttgcacgacctctgttcttggagttcccaaaagactcttccacgtggacagtcgatcaccagatgctgtggggcgaggctctgctgattacacctgtattgcaacctggtaaggccgaagttaccgggtactttccattggggacctggtatgatctgcaaacagtcccggttgaagctcttggaagtcttccacctccacctgctgcaccaagggagcctgcgatccactctgaaggacagtgggtaactttgcctgcaccgctggacaccatcaatgtccatctgcgcgaaggctacatcataccacttcaaggtcctggactgaccactacagagtctagaaaacaaccaatggctcttgctgttgcactgactaaaagcggcgaagcaaggggtgagctgttctgggacgacggagagtcactggaggtactcgaacgaggcgcgtatacgcaggtcatttttgaggctcgcaataatacgatcgttaacgagctggtccacgtcacttcagaaggtgcaggccttcagttgggcaaggtaactgtcctgggagttgctacagcaccgcagcaggtcttgtccaacggacggcccgtaagcaactttacctatagtcctgataccaaagttctggacatctgcgttgctctgctgatgggtgagcagttcctggtatcatggtgc

SEQ ID NO: 530 - protein, 944 aa, synthetic construct
  REGION 1..944: note = Variant of the Homo Sapiens Lysosomal alpha-glucosidase
MEWSWVFLFFLSVTTGVHSGHILWHDFSTVPRELSGSSQVLEETHPAHQVGASRPGPRDAQLHPGRPRAVPTQCDVPHNSRFDCAPEKAITQEQCEARGCCYIPAKQGLQGAQMGQPWCFFPPSYPSYKLENLSQSEMGYTATLTRTTPSFFPKDILTLRLDVMMETENRLHFTIKDPANRRYEVPLETPHVHSRAPSPLYSVEFSEEPFGVIVRRQLDGRVLLNTTVAPLFFADQFLQLSTSLPSQYITGLAEHLSPLMLSTSWNKITLWNRDLAPTPGANLYGSHPFYLALEDGGSAHGVFLLNSNAMDVVLQPSPALSWRSTGGILDVYIFLGPEPKSVVQQYLDVVGYPFMPPYWGLGFHLCRWGYSSTAITRQVVENMTRAHFPLDVQWNDLDYMDSRRDFTFNKDGFRDFPAMVQELHQGGRRYMMIVDPGISSSGPAGSYRPYDEGLRRGVFITNETGQPLIGKVWPGSTAFPDFTNPEALAWWEDMVAEFHDQVPFDGMWIDMNEPSNFIRGSVDGCPNNELENPPYVPGVVGGTLQAATICASSHQFLSTHYNLHNLYGTTEAIASHRALVKARGTRPFVISRSTFAGHGRYAGHWTGDVWSSWEQLASSVPEILQFNLLGVPLVGADVCGFLGNTSEELCVRWTQLGAFYPFMRNHNSLTSLPQEPYSFSEPAQQAMRKALGLRYALLPHLYTLFHQAHVHGETVARPLFLEFPKDSSTWTVDHQMLWGEALLITPVLQPGKAEVTGYFPLGTWYDLQTVPVEALGSLPPPPAAPREPAIHSEGQWVTLPAPLDTINVHLREGYIIPLQGPGLTTTESRKQPMALAVALTKSGEARGELFWDDGESLEVLERGAYTQVIFEARNNTIVNELVHVTSEGAGLQLGKVTVLGVATAPQQVLSNGRPVSNFTYSPDTKVLDICVALLMGEQFLVSWC

SEQ ID NO: 531 - DNA, 2832 bp, synthetic construct
  misc_feature 1..2832: note = Variant of the Homo Sapiens Lysosomal alpha-glucosidase
  source 1..2832: mol_type = other DNA
atggaatggagctgggtctttctcttcttcctgtcagtaacgactggtgtccactccggacacattctgtggcatgatttttctaccgtgcctagagagctttccggttcaagtcaagtcctcgaagaaacacatccagcccatcaggttggcgcatctaggccgggccctcgggacgctcaactccacccagggagacctagggccgttcccactcagtgcgacgtgccagagaactcacgcttcgattgtgcacctgagaaggctatcacgcaagagcagtgcgaggcccgcggatgttgttacataccggctaaacaggggctgcagggtgcgcagatgggccaaccttggtgcttcttcccaccatcctatccgagttacaagctggagaatctctcccagtctgaaatgggatataccgcaacactgactcggaccacccccaccttctttcccaaagatatcttgactctgagacttgacgtaatgatggagacagaaaacaggctccactttaccattaaggaccctgccaatcgccgatacgaggtgcctctggaaacaccacacgtgcacagtagagctccatcacctctgtattctgtcgagttctccgaagagccgtttggcgttatcgtcaggaggcagctcgacgggcgagtgcttctgaacacgactgtggccccgttgttctttgcggatcagtttctgcaactgtcaacaagtctcccttctcagtacattaccgggcttgcagagcatctgtccccactcatgctgagtacttcatggaacaaaatcacactgtggaatagagaccttgctcctactccaggagccaacttgtatggttctcaccctttctacttggccctggaagatggcggatcagcgcatggcgtattcctcctgaattccaacgcaatggacgttgttcttcagccatctcctgctttgagttggagatctacaggcgggatactggacgtctacatctttctgggtccagagcctaaatccgtagtgcagcagtatcttgatgtcgtcggatacccgtttatgccaccatattggggcctggggttccacttgtgccgctggggatattcatccaccgccattacacgacaagttgttgagaatatgaccagggcacattttcctctggatgtacagtggaacgacctggactacatggatagtcgccgcgacttcaccttcaataaggatgggttcagagactttcctgctatggtccaagaacttcaccagggaggcaggaggtacatgatgatcgtagatccgggaatttcttcttctggcccagccggttcatacagaccgtatgacgaaggactgcgacgaggcgtctttatcacgaacgagactggtcagcctttgataggcaaggtttggccagggtccaccgctttcccggatttcacaaatcctgaggcactggcctggtgggaagatatggtcgccgagtttcacgaccaggtcccatttgacgggatgtggatcgacatgaacgagccatccaacttcattagaggaagtgtggatggctgtccgaataatgagctggaaaaccctccttacgtaccaggcgttgttggtgggactcttcaagctgcgacgatttgcgcatcctcccatcagttcctgtcaacccactataacttgcacaatctgtacgggacaacagaggctatcgccagtcatagggccctggtaaaagctagaggaacacgccctttcgttatctctcgctcaacttttgcaggccacggtaggtatgccggacattggaccggcgacgtctggagttcttgggaacagctggcttcctccgttccagagatattgcagtttaacctgttgggagtcccacttgtaggtgcagatgtttgtggcttcctggggaacacctcagaagaattgtgcgtaagatggactcaactgggcgccttctacccttttatgcgcaatcacaactcactgacatctttgcctcaagaaccgtactcatttagtgagccagcacagcaggccatgaggaaggctcttggcctgagatatgcacttctgccgcatctgtacacccttttccaccaggctcatgtccatggagagactgttgcacgacctctgttcttggagttcccaaaagactcttccacgtggacagtcgatcaccagatgctgtggggcgaggctctgctgattacacctgtattgcaacctggtaaggccgaagttaccgggtactttccattggggacctggtatgatctgcaaacagtcccggttgaagctcttggaagtcttccacctccacctgctgcaccaagggagcctgcgatccactctgaaggacagtgggtaactttgcctgcaccgctggacaccatcaatgtccatctgcgcgaaggctacatcataccacttcaaggtcctggactgaccactacagagtctagaaaacaaccaatggctcttgctgttgcactgactaaaagcggcgaagcaaggggtgagctgttctgggacgacggagagtcactggaggtactcgaacgaggcgcgtatacgcaggtcatttttgaggctcgcaataatacgatcgttaacgagctggtccacgtcacttcagaaggtgcaggccttcagttgggcaaggtaactgtcctgggagttgctacagcaccgcagcaggtcttgtccaacggacggcccgtaagcaactttacctatagtcctgataccaaagttctggacatctgcgttgctctgctgatgggtgagcagttcctggtatcatggtgc

SEQ ID NO: 532 - protein, 944 aa, synthetic construct
  REGION 1..944: note = Variant of the Homo Sapiens Lysosomal alpha-glucosidase
MEWSWVFLFFLSVTTGVHSGHILWHDFSTVPRELSGSSQVLEETHPAHQVGASRPGPRDAQLHPGRPRAVPTQCDVPENSRFDCAPEKAITQEQCEARGCCYIPAKQGLQGAQMGQPWCFFPPSYPSYKLENLSQSEMGYTATLTRTTPTFFPKDILTLRLDVMMETENRLHFTIKDPANRRYEVPLETPHVHSRAPSPLYSVEFSEEPFGVIVRRQLDGRVLLNTTVAPLFFADQFLQLSTSLPSQYITGLAEHLSPLMLSTSWNKITLWNRDLAPTPGANLYGSHPFYLALEDGGSAHGVFLLNSNAMDVVLQPSPALSWRSTGGILDVYIFLGPEPKSVVQQYLDVVGYPFMPPYWGLGFHLCRWGYSSTAITRQVVENMTRAHFPLDVQWNDLDYMDSRRDFTFNKDGFRDFPAMVQELHQGGRRYMMIVDPGISSSGPAGSYRPYDEGLRRGVFITNETGQPLIGKVWPGSTAFPDFTNPEALAWWEDMVAEFHDQVPFDGMWIDMNEPSNFIRGSVDGCPNNELENPPYVPGVVGGTLQAATICASSHQFLSTHYNLHNLYGTTEAIASHRALVKARGTRPFVISRSTFAGHGRYAGHWTGDVWSSWEQLASSVPEILQFNLLGVPLVGADVCGFLGNTSEELCVRWTQLGAFYPFMRNHNSLTSLPQEPYSFSEPAQQAMRKALGLRYALLPHLYTLFHQAHVHGETVARPLFLEFPKDSSTWTVDHQMLWGEALLITPVLQPGKAEVTGYFPLGTWYDLQTVPVEALGSLPPPPAAPREPAIHSEGQWVTLPAPLDTINVHLREGYIIPLQGPGLTTTESRKQPMALAVALTKSGEARGELFWDDGESLEVLERGAYTQVIFEARNNTIVNELVHVTSEGAGLQLGKVTVLGVATAPQQVLSNGRPVSNFTYSPDTKVLDICVALLMGEQFLVSWC

SEQ ID NO: 533 - DNA, 2832 bp, synthetic construct
  misc_feature 1..2832: note = Variant of the Homo Sapiens Lysosomal alpha-glucosidase
  source 1..2832: mol_type = other DNA
atggaatggagctgggtctttctcttcttcctgtcagtaacgactggtgtccactccggacacattctgtggcatgatttttctaccgtgcctagagagctttccggttcaagtcaagtcctcgaagaaacacatccagcccatcaggttggcgcatctaggccgggccctcgggacgctcaactccacccagggagacctagggccgttcccactcagtgcgacgtgccagagaactcacgcttcgattgtgcacctgagaaggctatcacgcaagagcagtgcgaggcccgcggatgttgttacataccggctaaacaggggctgcagggtgcgcagatgggccaaccttggtgcttcttcccaccatcctatccgagttacaagctggagaatctctcccagtctgaaatgggatataccgcaacactgactcggaccaccccctccttctttcccaaagatatcttgactctgagacttgacgtaatgatggagacagaaaacaggctccactttaccattaaggaccctgccaatcgccgatacgaggtgcctctggaaacaccacacgtgcacagtagagctccatcacctctgtattctgtcgagttctccgaagagccgtttggcgttatcgtcaggaggcagctcgacgggcgagtgcttctgaacacgactgtggccccgttgttctttgcggatcagtttctgcaactgtcaacaagtctcccttctcagtacattaccgggcttgcagagcatctgtccccactcatgctgagtacttcatggaacaaaatcacactgtggaatagagaccttgctcctactccaggagccaacttgtatggttctcaccctttctacttggccctggaagatggcggatcagcgcatggcgtattcctcctgaattccaacgcaatggacgttgttcttcagccatctcctgctttgagttggagatctacaggcgggatactggacgtctacatctttctgggtccagagcctaaatccgtagtgcagcagtatcttgatgtcgtcggatacccgtttatgccaccatattggggcctggggttccacttgtgccgctggggatattcatccaccgccattacacgacaagttgttgagaatatgaccagggcacattttcctctggatgtacagtggaacgacctggactacatggatagtcgccgcgacttcaccttcaataaggatgggttcagagactttcctgctatggtccaagaacttcaccagggaggcaggaggtacatgatgatcgtagatccgggaatttcttcttctggcccagccggttcatacagaccgtatgacgaaggactgcgacgaggcgtctttatcacgaacgagactggtcagcctttgataggcaaggtttggccagggtccaccgctttcccggatttcacaaatcctgaggcactggcctggtgggaagatatggtcgccgagtttcacgaccaggtcccatttgacgggatgtggatcgacatgaacgagccatccaacttcattagaggaagtgtggatggctgtccgaataatgagctggaaaaccctccttacgtaccaggcgttgttggtgggactcttcaagctgcgacgatttgcgcatcctcccatcagttcctgtcaacccactataacttgcacaatctgtacgggacaacagaggctatcgccagtcatagggccctggtaaaagctagaggaacacgccctttcgttatctctcgctcaacttttgcaggccacggtaggtatgccggacattggaccggcgacgtctggagttcttgggaacagctggcttcctccgttccagagatattgcagtttaacctgttgggagtcccacttgtaggtgcagatgtttgtggcttcctggggaacacctcagaagaattgtgcgtaagatggactcaactgggcgccttctacccttttatgcgcaatcacaactcactgacatctttgcctcaagaaccgtactcatttagtgagccagcacagcaggccatgaggaaggctcttggcctgagatatgcacttctgccgcatctgtacacccttttccaccaggctcatgtccatggagagactgttgcacgacctctgttcttggagttcccaaaagactcttccacgtggacagtcgatcaccagatgctgtggggcgaggctctgctgattacacctgtattgcaacctggtaaggccgaagttaccgggtactttccattggggacctggtatgatctgcaaacagtcccggttgaagctcttggaagtcttccacctccacctgctgcaccaagggagcctgcgatccactctgaaggacagtgggtaactttgcctgcaccgctggacaccatcaatgtccatctgcgcgaaggctacatcataccacttcaaggtcctggactgaccactacagagtctagacaacaaccaatggctcttgctgttgcactgactaaaagcggcgaagcaaggggtgagctgttctgggacgacggagagtcactggaggtactcgaacgaggcgcgtatacgcaggtcatttttgaggctcgcaataatacgatcgttaacgagctggtccacgtcacttcagaaggtgcaggccttcagttgggcaaggtaactgtcctgggagttgctacagcaccgcagcaggtcttgtccaacggacggcccgtaagcaactttacctatagtcctgataccaaagttctggacatctgcgttgctctgctgatgggtgagcagttcctggtatcatggtgc

SEQ ID NO: 534 - protein, 944 aa, synthetic construct
  REGION 1..944: note = Variant of the Homo Sapiens Lysosomal alpha-glucosidase
MEWSWVFLFFLSVTTGVHSGHILWHDFSTVPRELSGSSQVLEETHPAHQVGASRPGPRDAQLHPGRPRAVPTQCDVPENSRFDCAPEKAITQEQCEARGCCYIPAKQGLQGAQMGQPWCFFPPSYPSYKLENLSQSEMGYTATLTRTTPSFFPKDILTLRLDVMMETENRLHFTIKDPANRRYEVPLETPHVHSRAPSPLYSVEFSEEPFGVIVRRQLDGRVLLNTTVAPLFFADQFLQLSTSLPSQYITGLAEHLSPLMLSTSWNKITLWNRDLAPTPGANLYGSHPFYLALEDGGSAHGVFLLNSNAMDVVLQPSPALSWRSTGGILDVYIFLGPEPKSVVQQYLDVVGYPFMPPYWGLGFHLCRWGYSSTAITRQVVENMTRAHFPLDVQWNDLDYMDSRRDFTFNKDGFRDFPAMVQELHQGGRRYMMIVDPGISSSGPAGSYRPYDEGLRRGVFITNETGQPLIGKVWPGSTAFPDFTNPEALAWWEDMVAEFHDQVPFDGMWIDMNEPSNFIRGSVDGCPNNELENPPYVPGVVGGTLQAATICASSHQFLSTHYNLHNLYGTTEAIASHRALVKARGTRPFVISRSTFAGHGRYAGHWTGDVWSSWEQLASSVPEILQFNLLGVPLVGADVCGFLGNTSEELCVRWTQLGAFYPFMRNHNSLTSLPQEPYSFSEPAQQAMRKALGLRYALLPHLYTLFHQAHVHGETVARPLFLEFPKDSSTWTVDHQMLWGEALLITPVLQPGKAEVTGYFPLGTWYDLQTVPVEALGSLPPPPAAPREPAIHSEGQWVTLPAPLDTINVHLREGYIIPLQGPGLTTTESRQQPMALAVALTKSGEARGELFWDDGESLEVLERGAYTQVIFEARNNTIVNELVHVTSEGAGLQLGKVTVLGVATAPQQVLSNGRPVSNFTYSPDTKVLDICVALLMGEQFLVSWC

SEQ ID NO: 535 - DNA, 2832 bp, synthetic construct
  misc_feature 1..2832: note = Variant of the Homo Sapiens Lysosomal alpha-glucosidase
  source 1..2832: mol_type = other DNA
atggaatggagctgggtctttctcttcttcctgtcagtaacgactggtgtccactccggacacattctgtggcatgatttttctaccgtgcctagagagctttccggttcaagtcaagtcctcgaagaaacacatccagcccatcaggttggcgcatctaggccgggccctcgggacgctcaactccacccagggagacctagggccgttcccactcagtgcgacgtgccagagaactcacgcttcgattgtgcacctgagaaggctatcacgcaagagcagtgcgaggcccgcggatgttgttacataccggctaaacaggggctgcagggtgcgcagatgggccaaccttggtgcttcttcccaccatcctatccgagttacaagctggagaatctctcccagtctgaaatgggatataccgcaacactgactcggaccaccccctccttctttcccaaagatatcttgactctgagacttgacgtaatgatggagacagaaaacaggctccactttaccattaaggaccctgccaatcgccgatacgaggtgcctctggaaacaccacacgtgcacagtagagctccatcacctctgtattctgtcgagttctccgaagagccgtttggcgttatcgtcaggaggcagctcgacgggcgagtgcttctgaacacgactgtggccccgttgttctttgcggatcagtttctgcaactgtcaacaagtctcccttctcagtacattaccgggcttgcagagcatctgtccccactcatgctgagtacttcatggaacaaaatcacactgtggaatagagaccttgctcctactccaggagccaacttgtatggttctcaccctttctacttggccctggaagatggcggatcagcgcatggcgtattcctcctgaattccaacgcaatggacgttgttcttcagccatctcctgctttgagttggagatctacaggcgggatactggacgtctacatctttctgggtccagagcctaaatccgtagtgcagcagtatcttgatgtcgtcggatacccgtttatgccaccatattggggcctggggttccacttgtgccgctggggatattcatccaccgccattacacgacaagttgttgagaatatgaccagggcacattttcctctggatgtacagtggaacgacctggactacatggatagtcgccgcgacttcaccttcaataaggatgggttcagagactttcctgctatggtccaagaacttcaccagggaggcaggaggtacatgatgatcgtagatccgggaatttcttcttctggcccagccggttcatacagaccgtatgacgaaggactgcgacgaggcgtctttatcacgaacgagactggtcagcctttgataggcaaggtttggccagggtccaccgctttcccggatttcacaaatcctgaggcactggcctggtgggaagatatggtcgccgagtttcacgaccaggtcccatttgacgggatgtggatcgacatgaacgagccatccaacttcattagaggaagtgtggatggctgtccgaataatgagctggaaaaccctccttacgtaccaggcgttgttggtgggactcttcaagctgcgacgatttgcgcatcctcccatcagttcctgtcaacccactataacttgcacaatctgtacgggacaacagaggctatcgccagtcatagggccctggtaaaagctagaggaacacgccctttcgttatctctcgctcaacttttgcaggccacggtaggtatgccggacattggaccggcgacgtctggagttcttgggaacagctggcttcctccgttccagagatattgcagtttaacctgttgggagtcccacttgtaggtgcagatgtttgtggcttcctggggaacacctcagaagaattgtgcgtaagatggactcaactgggcgccttctacccttttatgcgcaatcacaactcactgacatctttgcctcaagaaccgtactcatttagtgagccagcacagcaggccatgaggaaggctcttggcctgagatatgcacttctgccgcatctgtacacccttttccaccaggctcatgtccatggagagactgttgcacgacctctgttcttggagttcccaaaagactcttccacgtggacagtcgatcaccagatgctgtggggcgaggctctgctgattacacctgtattgcaacctggtaaggccgaagttaccgggtactttccattggggacctggtatgatctgcaaacagtcccggttgaagctcttggaagtcttccacctccacctgctgcaccaagggagcctgcgatccactctgaaggacagtgggtaactttgcctgcaccgctggacaccatcaatgtccatctgcgcgaaggctacatcataccacttcaaggtcctggactgaccactacagagtctagaaaacaaccaatggctcttgctgttgcactgactaaaagcggcgaagcaaggggtgagctgttctgggacgacggagagtcactggaggtactcgaacgaggcgcgtatacgcaggtcatttttgaggctcgcaataatacgatcgttaacgagctggtccacgtcacttcagaaggtgcaggccttcagttgggcaaggtaactgtcctgggagttgctacagcaccgcagcaggtcttgtccaacggaatccccgtaagcaactttacctatagtcctgataccaaagttctggacatctgcgttgctctgctgatgggtgagcagttcctggtatcatggtgc

SEQ ID NO: 536 - protein, 944 aa, synthetic construct
  REGION 1..944: note = Variant of the Homo Sapiens Lysosomal alpha-glucosidase
MEWSWVFLFFLSVTTGVHSGHILWHDFSTVPRELSGSSQVLEETHPAHQVGASRPGPRDAQLHPGRPRAVPTQCDVPENSRFDCAPEKAITQEQCEARGCCYIPAKQGLQGAQMGQPWCFFPPSYPSYKLENLSQSEMGYTATLTRTTPSFFPKDILTLRLDVMMETENRLHFTIKDPANRRYEVPLETPHVHSRAPSPLYSVEFSEEPFGVIVRRQLDGRVLLNTTVAPLFFADQFLQLSTSLPSQYITGLAEHLSPLMLSTSWNKITLWNRDLAPTPGANLYGSHPFYLALEDGGSAHGVFLLNSNAMDVVLQPSPALSWRSTGGILDVYIFLGPEPKSVVQQYLDVVGYPFMPPYWGLGFHLCRWGYSSTAITRQVVENMTRAHFPLDVQWNDLDYMDSRRDFTFNKDGFRDFPAMVQELHQGGRRYMMIVDPGISSSGPAGSYRPYDEGLRRGVFITNETGQPLIGKVWPGSTAFPDFTNPEALAWWEDMVAEFHDQVPFDGMWIDMNEPSNFIRGSVDGCPNNELENPPYVPGVVGGTLQAATICASSHQFLSTHYNLHNLYGTTEAIASHRALVKARGTRPFVISRSTFAGHGRYAGHWTGDVWSSWEQLASSVPEILQFNLLGVPLVGADVCGFLGNTSEELCVRWTQLGAFYPFMRNHNSLTSLPQEPYSFSEPAQQAMRKALGLRYALLPHLYTLFHQAHVHGETVARPLFLEFPKDSSTWTVDHQMLWGEALLITPVLQPGKAEVTGYFPLGTWYDLQTVPVEALGSLPPPPAAPREPAIHSEGQWVTLPAPLDTINVHLREGYIIPLQGPGLTTTESRKQPMALAVALTKSGEARGELFWDDGESLEVLERGAYTQVIFEARNNTIVNELVHVTSEGAGLQLGKVTVLGVATAPQQVLSNGIPVSNFTYSPDTKVLDICVALLMGEQFLVSWC

SEQ ID NO: 537 - DNA, 2832 bp, synthetic construct
  misc_feature 1..2832: note = Variant of the Homo Sapiens Lysosomal alpha-glucosidase
  source 1..2832: mol_type = other DNA
atggaatggagctgggtctttctcttcttcctgtcagtaacgactggtgtccactccggacacattctgtggcatgatttttctaccgtgcctagagagctttccggttcaagtcaagtcctcgaagaaacacatccagcccatcaggttggcgcatctaggccgggccctcgggacgctcaactccacccagggagacctagggccgttcccactcagtgcgacgtgccagagaactcacgcttcgattgtgcacctgagaaggctatcacgcaagagcagtgcgaggcccgcggatgttgttacataccggctaaacaggggctgcagggtgcgcagatgggccaaccttggtgcttcttcccaccatcctatccgagttacaagctggagaatctctcccagtctgaaatgggatataccgcaacactgactcggaccaccccctccttctttcccaaagatatcttgactctgagacttgacgtaatgatggagacagaaaacaggctccactttaccattaaggaccctgccaatcgccgatacgaggtgcctctggaaacaccacacgtgcacagtagagctccatcacctctgtattctgtcgagttctccgaagagccgtttggcgttatcgtcaggaggcagctcgacgggcgagtgcttctgaacacgactgtggccccgttgttctttgcggatcagtttctgcaactgtcaacaagtctcccttctcagtacattaccgggcttgcagagcatctgtccccactcatgctgagtacttcatggaacaaaatcacactgtggaatagagaccttgctcctactccaggagccaacttgtatggttctcaccctttctacttggccctggaagatggcggatcagcgcatggcgtattcctcctgaattccaacgcaatggacgttgttcttcagccatctcctgctttgagttggagatctacaggcgggatactggacgtctacatctttctgggtccagagcctaaatccgtagtgcagcagtatcttgatgtcgtcggatacccgtttatgccaccatattggggcctggggttccacttgtgccgctggggatattcatccaccgccattacacgacaagttgttgagaatatgaccagggcacattttcctctggatgtacagtggaacgacctggactacatggatagtcgccgcgacttcaccttcaataaggatgggttcagagactttcctgctatggtccaagaacttcaccagggaggcaggaggtacatgatgatcgtagatccgggaatttcttcttctggcccagccggttcatacagaccgtatgacgaaggactgcgacgaggcgtctttatcacgaacgagactggtcagcctttgataggcaaggtttggccagggtccaccgctttcccggatttcacaaatcctgaggcactggcctggtgggaagatatggtcgccgagtttcacgaccaggtcccatttgacgggatgtggatcgacatgaacgagccatccaacttcattagaggaagtgtggatggctgtccgaataatgagctggaaaaccctccttacgtaccaggcgttgttggtgggactcttcaagctgcgacgatttgcgcatcctcccatcagttcctgtcaacccactataacttgcacaatctgtacgggacaacagaggctatcgccagtcatagggccctggtaaaagctagaggaacacgccctttcgttatctctcgctcaacttttgcaggccacggtaggtatgccggacattggaccggcgacgtctggagttcttgggaacagctggcttcctccgttccagagatattgcagtttaacctgttgggagtcccacttgtaggtgcagatgtttgtggcttcctggggaacacctcagaagaattgtgcgtaagatggactcaactgggcgccttctacccttttatgcgcaatcacaactcactgacatctttgcctcaagaaccgtactcatttagtgagccagcacagcaggccatgaggaaggctcttggcctgagatatgcacttctgccgcatctgtacacccttttccaccaggctcatgtccatggagagactgttgcacgacctctgttcttggagttcccaaaagactcttccacgtggacagtcgatcaccagatgctgtggggcgaggctctgctgattacacctgtattgcaacctggtaaggccgaagttaccgggtactttccattggggacctggtatgatctgcaaacagtcccggttgaagctcttggaagtcttccacctccacctgctgcaccaagggagcctgcgatccactctgaaggacagtgggtaactttgcctgcaccgctggacaccatcaatgtccatctgcgcgaaggctacatcataccacttcaaggtcctggactgaccactacagagtctagaaaacaaccaatggctcttgctgttgcactgactaaaagcggcgaagcaaggggtgagctgttctgggacgacggagagtcactggaggtactcgaacgaggcgcgtatacgcaggtcatttttgaggctcgcaataatacgatcgttaacgagctggtccacgtcacttcagaaggtgcaggccttcagttgggcaaggtaactgtcctgggagttgctacagcaccgcagcaggtcttgtccaacggacatcccgtaagcaactttacctatagtcctgataccaaagttctggacatctgcgttgctctgctgatgggtgagcagttcctggtatcatggtgc

SEQ ID NO: 538 - protein, 944 aa, synthetic construct
  REGION 1..944: note = Variant of the Homo Sapiens Lysosomal alpha-glucosidase
MEWSWVFLFFLSVTTGVHSGHILWHDFSTVPRELSGSSQVLEETHPAHQVGASRPGPRDAQLHPGRPRAVPTQCDVPENSRFDCAPEKAITQEQCEARGCCYIPAKQGLQGAQMGQPWCFFPPSYPSYKLENLSQSEMGYTATLTRTTPSFFPKDILTLRLDVMMETENRLHFTIKDPANRRYEVPLETPHVHSRAPSPLYSVEFSEEPFGVIVRRQLDGRVLLNTTVAPLFFADQFLQLSTSLPSQYITGLAEHLSPLMLSTSWNKITLWNRDLAPTPGANLYGSHPFYLALEDGGSAHGVFLLNSNAMDVVLQPSPALSWRSTGGILDVYIFLGPEPKSVVQQYLDVVGYPFMPPYWGLGFHLCRWGYSSTAITRQVVENMTRAHFPLDVQWNDLDYMDSRRDFTFNKDGFRDFPAMVQELHQGGRRYMMIVDPGISSSGPAGSYRPYDEGLRRGVFITNETGQPLIGKVWPGSTAFPDFTNPEALAWWEDMVAEFHDQVPFDGMWIDMNEPSNFIRGSVDGCPNNELENPPYVPGVVGGTLQAATICASSHQFLSTHYNLHNLYGTTEAIASHRALVKARGTRPFVISRSTFAGHGRYAGHWTGDVWSSWEQLASSVPEILQFNLLGVPLVGADVCGFLGNTSEELCVRWTQLGAFYPFMRNHNSLTSLPQEPYSFSEPAQQAMRKALGLRYALLPHLYTLFHQAHVHGETVARPLFLEFPKDSSTWTVDHQMLWGEALLITPVLQPGKAEVTGYFPLGTWYDLQTVPVEALGSLPPPPAAPREPAIHSEGQWVTLPAPLDTINVHLREGYIIPLQGPGLTTTESRKQPMALAVALTKSGEARGELFWDDGESLEVLERGAYTQVIFEARNNTIVNELVHVTSEGAGLQLGKVTVLGVATAPQQVLSNGHPVSNFTYSPDTKVLDICVALLMGEQFLVSWC

SEQ ID NO: 539 - DNA, 2832 bp, synthetic construct
  misc_feature 1..2832: note = Variant of the Homo Sapiens Lysosomal alpha-glucosidase
  source 1..2832: mol_type = other DNA
atggaatggagctgggtctttctcttcttcctgtcagtaacgactggtgtccactccggacacattctgtggcatgatttttctaccgtgcctagagagctttccggttcaagtcaagtcctcgaagaaacacatccagcccatcaggttggcgcatctaggccgggccctcgggacgctcaactccacccagggagacctagggccgttcccactcagtgcgacgtgccagagaactcacgcttcgattgtgcacctgagaaggctatcacgcaagagcagtgcgaggcccgcggatgttgttacataccggctaaacaggggctgcagggtgcgcagatgggccaaccttggtgcttcttcccaccatcctatccgagttacaagctggagaatctctcccagtctgaaatgggatataccgcaacactgactcggaccaccccctccttctttcccaaagatatcttgactctgagacttgacgtaatgatggagacagaaaacaggctccactttaccattaaggaccctgccaatcgccgatacgaggtgcctctggaaacaccacacgtgcacagtagagctccatcacctctgtattctgtcgagttctccgaagagccgtttggcgttatcgtcaggaggcagctcgacgggcgagtgcttctgaacacgactgtggccccgttgttctttgcggatcagtttctgcaactgtcaacaagtctcccttctcagtacattaccgggcttgcagagcatctgtccccactcatgctgagtacttcatggaacaaaatcacactgtggaatagagaccttgctcctactccaggagccaacttgtatggttctcaccctttctacttggccctggaagatggcggatcagcgcatggcgtattcctcctgaattccaacgcaatggacgttgttcttcagccatctcctgctttgagttggagatctacaggcgggatactggacgtctacatctttctgggtccagagcctaaatccgtagtgcagcagtatcttgatgtcgtcggatacccgtttatgccaccatattggggcctggggttccacttgtgccgctggggatattcatccaccgccattacacgacaagttgttgagaatatgaccagggcacattttcctctggatgtacagtggaacgacctggactacatggatagtcgccgcgacttcaccttcaataaggatgggttcagagactttcctgctatggtccaagaacttcaccagggaggcaggaggtacatgatgatcgtagatccgggaatttcttcttctggcccagccggttcatacagaccgtatgacgaaggactgcgacgaggcgtctttatcacgaacgagactggtcagcctttgataggcaaggtttggccagggtccaccgctttcccggatttcacaaatcctgaggcactggcctggtgggaagatatggtcgccgagtttcacgaccaggtcccatttgacgggatgtggatcgacatgaacgagccatccaacttcattagaggaagtgtggatggctgtccgaataatgagctggaaaaccctccttacgtaccaggcgttgttggtgggactcttcaagctgcgacgatttgcgcatcctcccatcagttcctgtcaacccactataacttgcacaatctgtacgggacaacagaggctatcgccagtcatagggccctggtaaaagctagaggaacacgccctttcgttatctctcgctcaacttttgcaggccacggtaggtatgccggacattggaccggcgacgtctggagttcttgggaacagctggcttcctccgttccagagatattgcagtttaacctgttgggagtcccacttgtaggtgcagatgtttgtggcttcctggggaacacctcagaagaattgtgcgtaagatggactcaactgggcgccttctacccttttatgcgcaatcacaactcactgacatctttgcctcaagaaccgtactcatttagtgagccagcacagcaggccatgaggaaggctcttggcctgagatatgcacttctgccgcatctgtacacccttttccaccaggctcatgtccatggagagactgttgcacgacctctgttcttggagttcccaaaagactcttccacgtggacagtcgatcaccagatgctgtggggcgaggctctgctgattacacctgtattgcaacctggtaaggccgaagttaccgggtactttccattggggacctggtatgatctgcaaacagtcccggttgaagctcttggaagtcttccacctccacctgctgcaccaagggagcctgcgatccactctgaaggacagtgggtaactttgcctgcaccgctggacaccatcaatgtccatctgcgcgaaggctacatcataccacttcaaggtcctggactgaccactacagagtctagaaaacaaccaatggctcttgctgttgcactgactaaaagcggcgaagcaaggggtgagctgttctgggacgacggagagtcactggaggtactcgaacgaggcgcgtatacgcaggtcattttttatgctcgcaataatacgatcgttaacgagctggtccacgtcacttcagaaggtgcaggccttcagttgggcaaggtaactgtcctgggagttgctacagcaccgcagcaggtcttgtccaacggacggcccgtaagcaactttacctatagtcctgataccaaagttctggacatctgcgttgctctgctgatgggtgagcagttcctggtatcatggtgc

SEQ ID NO: 540 - protein, 944 aa, synthetic construct
  REGION 1..944: note = Variant of the Homo Sapiens Lysosomal alpha-glucosidase
MEWSWVFLFFLSVTTGVHSGHILWHDFSTVPRELSGSSQVLEETHPAHQVGASRPGPRDAQLHPGRPRAVPTQCDVPENSRFDCAPEKAITQEQCEARGCCYIPAKQGLQGAQMGQPWCFFPPSYPSYKLENLSQSEMGYTATLTRTTPSFFPKDILTLRLDVMMETENRLHFTIKDPANRRYEVPLETPHVHSRAPSPLYSVEFSEEPFGVIVRRQLDGRVLLNTTVAPLFFADQFLQLSTSLPSQYITGLAEHLSPLMLSTSWNKITLWNRDLAPTPGANLYGSHPFYLALEDGGSAHGVFLLNSNAMDVVLQPSPALSWRSTGGILDVYIFLGPEPKSVVQQYLDVVGYPFMPPYWGLGFHLCRWGYSSTAITRQVVENMTRAHFPLDVQWNDLDYMDSRRDFTFNKDGFRDFPAMVQELHQGGRRYMMIVDPGISSSGPAGSYRPYDEGLRRGVFITNETGQPLIGKVWPGSTAFPDFTNPEALAWWEDMVAEFHDQVPFDGMWIDMNEPSNFIRGSVDGCPNNELENPPYVPGVVGGTLQAATICASSHQFLSTHYNLHNLYGTTEAIASHRALVKARGTRPFVISRSTFAGHGRYAGHWTGDVWSSWEQLASSVPEILQFNLLGVPLVGADVCGFLGNTSEELCVRWTQLGAFYPFMRNHNSLTSLPQEPYSFSEPAQQAMRKALGLRYALLPHLYTLFHQAHVHGETVARPLFLEFPKDSSTWTVDHQMLWGEALLITPVLQPGKAEVTGYFPLGTWYDLQTVPVEALGSLPPPPAAPREPAIHSEGQWVTLPAPLDTINVHLREGYIIPLQGPGLTTTESRKQPMALAVALTKSGEARGELFWDDGESLEVLERGAYTQVIFYARNNTIVNELVHVTSEGAGLQLGKVTVLGVATAPQQVLSNGRPVSNFTYSPDTKVLDICVALLMGEQFLVSWC

SEQ ID NO: 541 - DNA, 2832 bp, synthetic construct
  misc_feature 1..2832: note = Variant of the Homo Sapiens Lysosomal alpha-glucosidase
  source 1..2832: mol_type = other DNA
atggaatggagctgggtctttctcttcttcctgtcagtaacgactggtgtccactccggacacattctgtggcatgatttttctaatgtgcctagagagctttccggttcaagtcaagtcctcgaagaaacacatccagcccatcaggttggcgcatctaggccgggccctcgggacgctcaactccacccagggagacctagggccgttcccactcagtgcgacgtgccagagaactcacgcttcgattgtgcacctgagaaggctatcacgcaagagcagtgcgaggcccgcggatgttgttacataccggctaaacaggggctgcagggtgcgcagatgggccaaccttggtgcttcttcccaccatcctatccgagttacaagctggagaatctctcccagtctgaaatgggatataccgcaacactgactcggaccaccccctccttctttcccaaagatatcttgactctgagacttgacgtaatgatggagacagaaaacaggctccactttaccattaaggaccctgccaatcgccgatacgaggtgcctctggaaacaccacacgtgcacagtagagctccatcacctctgtattctgtcgagttctccgaagagccgtttggcgttatcgtcaggaggcagctcgacgggcgagtgcttctgaacacgactgtggccccgttgttctttgcggatcagtttctgcaactgtcaacaagtctcccttctcagtacattaccgggcttgcagagcatctgtccccactcatgctgagtacttcatggaacaaaatcacactgtggaatagagaccttgctcctactccaggagccaacttgtatggttctcaccctttctacttggccctggaagatggcggatcagcgcatggcgtattcctcctgaattccaacgcaatggacgttgttcttcagccatctcctgctttgagttggagatctacaggcgggatactggacgtctacatctttctgggtccagagcctaaatccgtagtgcagcagtatcttgatgtcgtcggatacccgtttatgccaccatattggggcctggggttccacttgtgccgctggggatattcatccaccgccattacacgacaagttgttgagaatatgaccagggcacattttcctctggatgtacagtggaacgacctggactacatggatagtcgccgcgacttcaccttcaataaggatgggttcagagactttcctgctatggtccaagaacttcaccagggaggcaggaggtacatgatgatcgtagatccgggaatttcttcttctggcccagccggttcatacagaccgtatgacgaaggactgcgacgaggcgtctttatcacgaacgagactggtcagcctttgataggcaaggtttggccagggtccaccgctttcccggatttcacaaatcctgaggcactggcctggtgggaagatatggtcgccgagtttcacgaccaggtcccatttgacgggatgtggatcgacatgaacgagccatccaacttcattagaggaagtgtggatggctgtccgaataatgagctggaaaaccctccttacgtaccaggcgttgttggtgggactcttcaagctgcgacgatttgcgcatcctcccatcagttcctgtcaacccactataacttgcacaatctgtacgggacaacagaggctatcgccagtcatagggccctggtaaaagctagaggaacacgccctttcgttatctctcgctcaacttttgcaggccacggtaggtatgccggacattggaccggcgacgtctggagttcttgggaacagctggcttcctccgttccagagatattgcagtttaacctgttgggagtcccacttgtaggtgcagatgtttgtggcttcctggggaacacctcagaagaattgtgcgtaagatggactcaactgggcgccttctacccttttatgcgcaatcacaactcactgacatctttgcctcaagaaccgtactcatttagtgagccagcacagcaggccatgaggaaggctcttggcctgagatatgcacttctgccgcatctgtacacccttttccaccaggctcatgtccatggagagactgttgcacgacctctgttcttggagttcccaaaagactcttccacgtggacagtcgatcaccagatgctgtggggcgaggctctgctgattacacctgtattgcaacctggtaaggccgaagttaccgggtactttccattggggacctggtatgatctgcaaacagtcccggttgaagctcttggaagtcttccacctccacctgctgcaccaagggagcctgcgatccactctgaaggacagtgggtaactttgcctgcaccgctggacaccatcaatgtccatctgcgcgaaggctacatcataccacttcaaggtcctggactgaccactacagagtctagaaaacaaccaatggctcttgctgttgcactgactaaaagcggcgaagcaaggggtgagctgttctgggacgacggagagtcactggaggtactcgaacgaggcgcgtatacgcaggtcatttttgaggctcgcaataatacgatcgttaacgagctggtccacgtcacttcagaaggtgcaggccttcagttgggcaaggtaactgtcctgggagttgctacagcaccgcagcaggtcttgtccaacggacggcccgtaagcaactttacctatagtcctgataccaaagttctggacatctgcgttgctctgctgatgggtgagcagttcctggtatcatggtgc

SEQ ID NO: 542 - protein, 944 aa, synthetic construct
  REGION 1..944: note = Variant of the Homo Sapiens Lysosomal alpha-glucosidase
MEWSWVFLFFLSVTTGVHSGHILWHDFSNVPRELSGSSQVLEETHPAHQVGASRPGPRDAQLHPGRPRAVPTQCDVPENSRFDCAPEKAITQEQCEARGCCYIPAKQGLQGAQMGQPWCFFPPSYPSYKLENLSQSEMGYTATLTRTTPSFFPKDILTLRLDVMMETENRLHFTIKDPANRRYEVPLETPHVHSRAPSPLYSVEFSEEPFGVIVRRQLDGRVLLNTTVAPLFFADQFLQLSTSLPSQYITGLAEHLSPLMLSTSWNKITLWNRDLAPTPGANLYGSHPFYLALEDGGSAHGVFLLNSNAMDVVLQPSPALSWRSTGGILDVYIFLGPEPKSVVQQYLDVVGYPFMPPYWGLGFHLCRWGYSSTAITRQVVENMTRAHFPLDVQWNDLDYMDSRRDFTFNKDGFRDFPAMVQELHQGGRRYMMIVDPGISSSGPAGSYRPYDEGLRRGVFITNETGQPLIGKVWPGSTAFPDFTNPEALAWWEDMVAEFHDQVPFDGMWIDMNEPSNFIRGSVDGCPNNELENPPYVPGVVGGTLQAATICASSHQFLSTHYNLHNLYGTTEAIASHRALVKARGTRPFVISRSTFAGHGRYAGHWTGDVWSSWEQLASSVPEILQFNLLGVPLVGADVCGFLGNTSEELCVRWTQLGAFYPFMRNHNSLTSLPQEPYSFSEPAQQAMRKALGLRYALLPHLYTLFHQAHVHGETVARPLFLEFPKDSSTWTVDHQMLWGEALLITPVLQPGKAEVTGYFPLGTWYDLQTVPVEALGSLPPPPAAPREPAIHSEGQWVTLPAPLDTINVHLREGYIIPLQGPGLTTTESRKQPMALAVALTKSGEARGELFWDDGESLEVLERGAYTQVIFEARNNTIVNELVHVTSEGAGLQLGKVTVLGVATAPQQVLSNGRPVSNFTYSPDTKVLDICVALLMGEQFLVSWC

SEQ ID NO: 543 - DNA, 2832 bp, synthetic construct
  misc_feature 1..2832: note = Variant of the Homo Sapiens Lysosomal alpha-glucosidase
  source 1..2832: mol_type = other DNA
atggaatggagctgggtctttctcttcttcctgtcagtaacgactggtgtccactccggacacattctgtggcatgatttttctaccgtgcctagagagctttccggttcaagtcaagtcctcgaagaaacacatccagcccatcaggttggcgcatctaggccgggccctcgggacgctcaactccacccagggagacctagggccgttcccactcagtgcgacgtgccagagaactcacgcttcgattgtgcacctgagaaggctatcacgcaagagcagtgcgaggcccgcggatgttgttacataccggctaaacaggggctgcagggtgcgcagatgggccaaccttggtgcttcttcccaccatcctatccgagttacaagctggagaatctctcccagtctgaaatgggatataccgcaacactgactcggaccaccccctccttctttcccaaagatatcttgactctgagacttgacgtaatgatggagacagaaaacaggctccactttaccattaaggaccctgccaatcgccgatacgaggtgcctctggaaacaccacacgtgcacagtagagctccatcacctctgtattctgtcgagttctccgaagagccgtttggcgttatcgtcaggaggcagctcgacgggcgagtgcttctgaacacgactgtggccccgttgttctttgcggatcagtttctgcaactgtcaacaagtctcccttctcagtacattaccgggcttgcagagcatctgtccccactcatgctgagtacttcatggaacaaaatcacactgtggaatagagaccttgctcctactccaggagccaacttgtatggttctcaccctttctacttggccctggaagatggcggatcagcgcatggcgtattcctcctgaattccaacgcaatggacgttgttcttcagccatctcctgctttgagttggagatctacaggcgggatactggacgtctacatctttctgggtccagagcctaaatccgtagtgcagcagtatcttgatgtcgtcggatacccgtttatgccaccatattggggcctggggttccacttgtgccgctggggatattcatccaccgccattacacgacaagttgttgagaatatgaccagggcacattttcctctggatgtacagtggaacgacctggactacatggatagtcgccgcgacttcaccttcaataaggatgggttcagagactttcctgctatggtccaagaacttcaccagggaggcaggaggtacatgatgatcgtagatccgggaatttcttcttctggcccagccggttcatacagaccgtatgacgaaggactgcgacgaggcgtctttatcacgaacgagactggtcagcctttgataggcaaggtttggccagggtccaccgctttcccggatttcacaaatcctgaggcactggcctggtgggaagatatggtcgccgagtttcacgaccaggtcccatttgacgggatgtggatcgacatgaacgagccatccaacttcattagaggaagtgtggatggctgtccgaataatgagctggaaaaccctccttacgtaccaggcgttgttggtgggactcttcaagctgcgacgatttgcgcatcctcccatcagttcctgtcaacccactataacttgcacaatctgtacgggacaacagaggctatcgccagtcatagggccctggtaaaagctagaggaacacgccctttcgttatctctcgctcaacttttgcaggccacggtaggtatgccggacattggaccggcgacgtctggagttcttgggaacagctggcttcctccgttccagagatattgcagtttaacctgttgggagtcccacttgtaggtgcagatgtttgtggcttcctggggaacacctcagaagaattgtgcgtaagatggactcaactgggcgccttctacccttttatgcgcaatcacaactcactgaaatctttgcctcaagaaccgtactcatttagtgagccagcacagcaggccatgaggaaggctcttggcctgagatatgcacttctgccgcatctgtacacccttttccaccaggctcatgtccatggagagactgttgcacgacctctgttcttggagttcccaaaagactcttccacgtggacagtcgatcaccagatgctgtggggcgaggctctgctgattacacctgtattgcaacctggtaaggccgaagttaccgggtactttccattggggacctggtatgatctgcaaacagtcccggttgaagctcttggaagtcttccacctccacctgctgcaccaagggagcctgcgatccactctgaaggacagtgggtaactttgcctgcaccgctggacaccatcaatgtccatctgcgcgaaggctacatcataccacttcaaggtcctggactgaccactacagagtctagaaaacaaccaatggctcttgctgttgcactgactaaaagcggcgaagcaaggggtgagctgttctgggacgacggagagtcactggaggtactcgaacgaggcgcgtatacgcaggtcatttttgaggctcgcaataatacgatcgttaacgagctggtccacgtcacttcagaaggtgcaggccttcagttgggcaaggtaactgtcctgggagttgctacagcaccgcagcaggtcttgtccaacggacggcccgtaagcaactttacctatagtcctgataccaaagttctggacatctgcgttgctctgctgatgggtgagcagttcctggtatcatggtgc

SEQ ID NO: 544 - protein, 944 aa, synthetic construct
  REGION 1..944: note = Variant of the Homo Sapiens Lysosomal alpha-glucosidase
MEWSWVFLFFLSVTTGVHSGHILWHDFSTVPRELSGSSQVLEETHPAHQVGASRPGPRDAQLHPGRPRAVPTQCDVPENSRFDCAPEKAITQEQCEARGCCYIPAKQGLQGAQMGQPWCFFPPSYPSYKLENLSQSEMGYTATLTRTTPSFFPKDILTLRLDVMMETENRLHFTIKDPANRRYEVPLETPHVHSRAPSPLYSVEFSEEPFGVIVRRQLDGRVLLNTTVAPLFFADQFLQLSTSLPSQYITGLAEHLSPLMLSTSWNKITLWNRDLAPTPGANLYGSHPFYLALEDGGSAHGVFLLNSNAMDVVLQPSPALSWRSTGGILDVYIFLGPEPKSVVQQYLDVVGYPFMPPYWGLGFHLCRWGYSSTAITRQVVENMTRAHFPLDVQWNDLDYMDSRRDFTFNKDGFRDFPAMVQELHQGGRRYMMIVDPGISSSGPAGSYRPYDEGLRRGVFITNETGQPLIGKVWPGSTAFPDFTNPEALAWWEDMVAEFHDQVPFDGMWIDMNEPSNFIRGSVDGCPNNELENPPYVPGVVGGTLQAATICASSHQFLSTHYNLHNLYGTTEAIASHRALVKARGTRPFVISRSTFAGHGRYAGHWTGDVWSSWEQLASSVPEILQFNLLGVPLVGADVCGFLGNTSEELCVRWTQLGAFYPFMRNHNSLKSLPQEPYSFSEPAQQAMRKALGLRYALLPHLYTLFHQAHVHGETVARPLFLEFPKDSSTWTVDHQMLWGEALLITPVLQPGKAEVTGYFPLGTWYDLQTVPVEALGSLPPPPAAPREPAIHSEGQWVTLPAPLDTINVHLREGYIIPLQGPGLTTTESRKQPMALAVALTKSGEARGELFWDDGESLEVLERGAYTQVIFEARNNTIVNELVHVTSEGAGLQLGKVTVLGVATAPQQVLSNGRPVSNFTYSPDTKVLDICVALLMGEQFLVSWC

SEQ ID NO: 545 - DNA, 2832 bp, synthetic construct
  misc_feature 1..2832: note = Variant of the Homo Sapiens Lysosomal alpha-glucosidase
  source 1..2832: mol_type = other DNA
atggaatggagctgggtctttctcttcttcctgtcagtaacgactggtgtccactccggacacattctgtggcatgatttttctaccgtgcctagagagctttccggttcaagtcaagtcctcgaagaaacacatccagcccatcaggttggcgcatctaggccgggccctcgggacgctcaactccacccagggagacctagggccgttcccactcagtgcgacgtgccagagaactcacgcttcgattgtgcacctgagaaggctatcacgcaagagcagtgcgaggcccgcggatgttgttacataccggctaaacaggggctgcagggtgcgcagatgggccaaccttggtgcttcttcccaccatcctatccgagttacaagctggagaatctctcccagtctgaaatgggatataccgcaacactgactcggaccaccccctccttctttcccaaagatatcttgactctgagacttgacgtaatgatggagacagaaaacaggctccactttaccattaaggaccctgccaatcgccgatacgaggtgcctctggaaacaccacacgtgcacagtagagctccatcacctctgtattctgtcgagttctccgaagagccgtttggcgttatcgtcaggaggcagctcgacgggcgagtgcttctgaacacgactgtggccccgttgttctttgcggatcagtttctgcaactgtcaacaagtctcccttctcagtacattaccgggcttgcagagcatctgtccccactcatgctgagtacttcatggaacaaaatcacactgtggaatagagaccttgctcctactccaggagccaacttgtatggttctcaccctttctacttggccctggaagatggcggatcagcgcatggcgtattcctcctgaattccaacgcaatggacgttgttcttcagccatctcctgctttgagttggagatctacaggcgggatactggacgtctacatctttctgggtccagagcctaaatccgtagtgcagcagtatcttgatgtcgtcggatacccgtttatgccaccatattggggcctggggttccacttgtgccgctggggatattcatccaccgccattacacgacaagttgttgagaatatgaccagggcacattttcctctggatgtacagtggaacgacctggactacatggatagtcgccgcgacttcaccttcaataaggatgggttcagagactttcctgctatggtccaagaacttcaccagggaggcaggaggtacatgatgatcgtagatccgggaatttcttcttctggcccagccggttcatacagaccgtatgacgaaggactgcgacgaggcgtctttatcacgaacgagactggtcagcctttgataggcaaggtttggccagggtccaccgctttcccggatttcacaaatcctgaggcactggcctggtgggaagatatggtcgccgagtttcacgaccaggtcccatttgacgggatgtggatcgacatgaacgagccatccaacttcattagaggaagtgtggatggctgtccgaataatgagctggaaaaccctccttacgtaccaggcgttgttggtgggactcttcaagctgcgacgatttgcgcatcctcccatcagttcctgtcaacccactataacttgcacaatctgtacgggacaacagaggctatcgccagtcatagggccctggtaaaagctagaggaacacgccctttcgttatctctcgctcaacttttgcaggccacggtaggtatgccggacattggaccggcgacgtctggagttcttgggaacagctggcttcctccgttccagagatattgcagtttaacctgttgggagtcccacttgtaggtgcagatgtttgtggcttcctggggaacacctcagaagaattgtgcgtaagatggactcaactgggcgccttctacccttttatgcgcaatcacaactcactgacatctttgcctcaagaaccgtactcatttagtgagccagcacagcaggccatgaggaaggctcttgctctgagatatgcacttctgccgcatctgtacacccttttccaccaggctcatgtccatggagagactgttgcacgacctctgttcttggagttcccaaaagactcttccacgtggacagtcgatcaccagatgctgtggggcgaggctctgctgattacacctgtattgcaacctggtaaggccgaagttaccgggtactttccattggggacctggtatgatctgcaaacagtcccggttgaagctcttggaagtcttccacctccacctgctgcaccaagggagcctgcgatccactctgaaggacagtgggtaactttgcctgcaccgctggacaccatcaatgtccatctgcgcgaaggctacatcataccacttcaaggtcctggactgaccactacagagtctagaaaacaaccaatggctcttgctgttgcactgactaaaagcggcgaagcaaggggtgagctgttctgggacgacggagagtcactggaggtactcgaacgaggcgcgtatacgcaggtcatttttgaggctcgcaataatacgatcgttaacgagctggtccacgtcacttcagaaggtgcaggccttcagttgggcaaggtaactgtcctgggagttgctacagcaccgcagcaggtcttgtccaacggacggcccgtaagcaactttacctatagtcctgataccaaagttctggacatctgcgttgctctgctgatgggtgagcagttcctggtatcatggtgc

SEQ ID NO: 546 - protein, 944 aa, synthetic construct
  REGION 1..944: note = Variant of the Homo Sapiens Lysosomal alpha-glucosidase
MEWSWVFLFFLSVTTGVHSGHILWHDFSTVPRELSGSSQVLEETHPAHQVGASRPGPRDAQLHPGRPRAVPTQCDVPENSRFDCAPEKAITQEQCEARGCCYIPAKQGLQGAQMGQPWCFFPPSYPSYKLENLSQSEMGYTATLTRTTPSFFPKDILTLRLDVMMETENRLHFTIKDPANRRYEVPLETPHVHSRAPSPLYSVEFSEEPFGVIVRRQLDGRVLLNTTVAPLFFADQFLQLSTSLPSQYITGLAEHLSPLMLSTSWNKITLWNRDLAPTPGANLYGSHPFYLALEDGGSAHGVFLLNSNAMDVVLQPSPALSWRSTGGILDVYIFLGPEPKSVVQQYLDVVGYPFMPPYWGLGFHLCRWGYSSTAITRQVVENMTRAHFPLDVQWNDLDYMDSRRDFTFNKDGFRDFPAMVQELHQGGRRYMMIVDPGISSSGPAGSYRPYDEGLRRGVFITNETGQPLIGKVWPGSTAFPDFTNPEALAWWEDMVAEFHDQVPFDGMWIDMNEPSNFIRGSVDGCPNNELENPPYVPGVVGGTLQAATICASSHQFLSTHYNLHNLYGTTEAIASHRALVKARGTRPFVISRSTFAGHGRYAGHWTGDVWSSWEQLASSVPEILQFNLLGVPLVGADVCGFLGNTSEELCVRWTQLGAFYPFMRNHNSLTSLPQEPYSFSEPAQQAMRKALALRYALLPHLYTLFHQAHVHGETVARPLFLEFPKDSSTWTVDHQMLWGEALLITPVLQPGKAEVTGYFPLGTWYDLQTVPVEALGSLPPPPAAPREPAIHSEGQWVTLPAPLDTINVHLREGYIIPLQGPGLTTTESRKQPMALAVALTKSGEARGELFWDDGESLEVLERGAYTQVIFEARNNTIVNELVHVTSEGAGLQLGKVTVLGVATAPQQVLSNGRPVSNFTYSPDTKVLDICVALLMGEQFLVSWC

SEQ ID NO: 547 - DNA, 2832 bp, synthetic construct
  misc_feature 1..2832: note = Variant of the Homo Sapiens Lysosomal alpha-glucosidase
  source 1..2832: mol_type = other DNA
atggaatggagctgggtctttctcttcttcctgtcagtaacgactggtgtccactccggacacattctgtggcatgatttttctaccgtgcctagagagctttccggttcaagtcaagtcctcgaagaaacacatccagcccatcagacaggcgcatctaggccgggccctcgggacgctcaactccacccagggagacctagggccgttcccactcagtgcgacgtgccagagaactcacgcttcgattgtgcacctgagaaggctatcacgcaagagcagtgcgaggcccgcggatgttgttacataccggctaaacaggggctgcagggtgcgcagatgggccaaccttggtgcttcttcccaccatcctatccgagttacaagctggagaatctctcccagtctgaaatgggatataccgcaacactgactcggaccaccccctccttctttcccaaagatatcttgactctgagacttgacgtaatgatggagacagaaaacaggctccactttaccattaaggaccctgccaatcgccgatacgaggtgcctctggaaacaccacacgtgcacagtagagctccatcacctctgtattctgtcgagttctccgaagagccgtttggcgttatcgtcaggaggcagctcgacgggcgagtgcttctgaacacgactgtggccccgttgttctttgcggatcagtttctgcaactgtcaacaagtctcccttctcagtacattaccgggcttgcagagcatctgtccccactcatgctgagtacttcatggaacaaaatcacactgtggaatagagaccttgctcctactccaggagccaacttgtatggttctcaccctttctacttggccctggaagatggcggatcagcgcatggcgtattcctcctgaattccaacgcaatggacgttgttcttcagccatctcctgctttgagttggagatctacaggcgggatactggacgtctacatctttctgggtccagagcctaaatccgtagtgcagcagtatcttgatgtcgtcggatacccgtttatgccaccatattggggcctggggttccacttgtgccgctggggatattcatccaccgccattacacgacaagttgttgagaatatgaccagggcacattttcctctggatgtacagtggaacgacctggactacatggatagtcgccgcgacttcaccttcaataaggatgggttcagagactttcctgctatggtccaagaacttcaccagggaggcaggaggtacatgatgatcgtagatccgggaatttcttcttctggcccagccggttcatacagaccgtatgacgaaggactgcgacgaggcgtctttatcacgaacgagactggtcagcctttgataggcaaggtttggccagggtccaccgctttcccggatttcacaaatcctgaggcactggcctggtgggaagatatggtcgccgagtttcacgaccaggtcccatttgacgggatgtggatcgacatgaacgagccatccaacttcattagaggaagtgtggatggctgtccgaataatgagctggaaaaccctccttacgtaccaggcgttgttggtgggactcttcaagctgcgacgatttgcgcatcctcccatcagttcctgtcaacccactataacttgcacaatctgtacgggacaacagaggctatcgccagtcatagggccctggtaaaagctagaggaacacgccctttcgttatctctcgctcaacttttgcaggccacggtaggtatgccggacattggaccggcgacgtctggagttcttgggaacagctggcttcctccgttccagagatattgcagtttaacctgttgggagtcccacttgtaggtgcagatgtttgtggcttcctggggaacacctcagaagaattgtgcgtaagatggactcaactgggcgccttctacccttttatgcgcaatcacaactcactgacatctttgcctcaagaaccgtactcatttagtgagccagcacagcaggccatgaggaaggctcttggcctgagatatgcacttctgccgcatctgtacacccttttccaccaggctcatgtccatggagagactgttgcacgacctctgttcttggagttcccaaaagactcttccacgtggacagtcgatcaccagatgctgtggggcgaggctctgctgattacacctgtattgcaacctggtaaggccgaagttaccgggtactttccattggggacctggtatgatctgcaaacagtcccggttgaagctcttggaagtcttccacctccacctgctgcaccaagggagcctgcgatccactctgaaggacagtgggtaactttgcctgcaccgctggacaccatcaatgtccatctgcgcgaaggctacatcataccacttcaaggtcctggactgaccactacagagtctagaaaacaaccaatggctcttgctgttgcactgactaaaagcggcgaagcaaggggtgagctgttctgggacgacggagagtcactggaggtactcgaacgaggcgcgtatacgcaggtcatttttgaggctcgcaataatacgatcgttaacgagctggtccacgtcacttcagaaggtgcaggccttcagttgggcaaggtaactgtcctgggagttgctacagcaccgcagcaggtcttgtccaacggacggcccgtaagcaactttacctatagtcctgataccaaagttctggacatctgcgttgctctgctgatgggtgagcagttcctggtatcatggtgc

SEQ ID NO: 548 - protein, 944 aa, synthetic construct
  REGION 1..944: note = Variant of the Homo Sapiens Lysosomal alpha-glucosidase
MEWSWVFLFFLSVTTGVHSGHILWHDFSTVPRELSGSSQVLEETHPAHQTGASRPGPRDAQLHPGRPRAVPTQCDVPENSRFDCAPEKAITQEQCEARGCCYIPAKQGLQGAQMGQPWCFFPPSYPSYKLENLSQSEMGYTATLTRTTPSFFPKDILTLRLDVMMETENRLHFTIKDPANRRYEVPLETPHVHSRAPSPLYSVEFSEEPFGVIVRRQLDGRVLLNTTVAPLFFADQFLQLSTSLPSQYITGLAEHLSPLMLSTSWNKITLWNRDLAPTPGANLYGSHPFYLALEDGGSAHGVFLLNSNAMDVVLQPSPALSWRSTGGILDVYIFLGPEPKSVVQQYLDVVGYPFMPPYWGLGFHLCRWGYSSTAITRQVVENMTRAHFPLDVQWNDLDYMDSRRDFTFNKDGFRDFPAMVQELHQGGRRYMMIVDPGISSSGPAGSYRPYDEGLRRGVFITNETGQPLIGKVWPGSTAFPDFTNPEALAWWEDMVAEFHDQVPFDGMWIDMNEPSNFIRGSVDGCPNNELENPPYVPGVVGGTLQAATICASSHQFLSTHYNLHNLYGTTEAIASHRALVKARGTRPFVISRSTFAGHGRYAGHWTGDVWSSWEQLASSVPEILQFNLLGVPLVGADVCGFLGNTSEELCVRWTQLGAFYPFMRNHNSLTSLPQEPYSFSEPAQQAMRKALGLRYALLPHLYTLFHQAHVHGETVARPLFLEFPKDSSTWTVDHQMLWGEALLITPVLQPGKAEVTGYFPLGTWYDLQTVPVEALGSLPPPPAAPREPAIHSEGQWVTLPAPLDTINVHLREGYIIPLQGPGLTTTESRKQPMALAVALTKSGEARGELFWDDGESLEVLERGAYTQVIFEARNNTIVNELVHVTSEGAGLQLGKVTVLGVATAPQQVLSNGRPVSNFTYSPDTKVLDICVALLMGEQFLVSWC

SEQ ID NO: 549 - DNA, 2832 bp, synthetic construct
  misc_feature 1..2832: note = Variant of the Homo Sapiens Lysosomal alpha-glucosidase
  source 1..2832: mol_type = other DNA
atggaatggagctgggtctttctcttcttcctgtcagtaacgactggtgtccactccggacacattctgtggcatgatttttctaccgtgcctagagagctttccggttcaagtcaagtcctcgaagaaacacatccagcccatcaggttggcgcatctaggccgggccctcgggacgctcaactccacccagggagacctagggccgttcccactcagtgcgacgtgccagagaactcacgcttcgattgtgcacctgagaaggctatcacgcaagagcagtgcgaggcccgcggatgttgttacataccggctaaacaggggctgcagggtgcgcagatgggccaaccttggtgcttcttcccaccatcctatccgagttacaagctggagaatctctcccagtctgaaatgggatataccgcaacactgactcggaccaccccctccttctttcccaaagatatcttgactctgagacttgacgtaatgatggagacagaaaacaggctccactttaccattaaggaccctgccaatcgccgatacgaggtgcctctggaaacaccacacgtgcacagtagagctccatcacctctgtattctgtcgagttctccgaagagccgtttggcgttatcgtcaggaggcagctcgacgggcgagtgcttctgaacacgactgtggccccgttgttctttgcggatcagtttctgcaactgtcaacaagtctcccttctcagtacattaccgggcttgcagagcatctgtccccactcatgctgagtacttcatggaacaaaatcacactgtggaatagagaccttgctcctactccaggagccaacttgtatggttctcaccctttctacttggccctggaagatggcggatcagcgcatggcgtattcctcctgaattccaacgcaatggacgttgttcttcagccatctcctgctttgagttggagatctacaggcgggatactggacgtctacatctttctgggtccagagcctaaatccgtagtgcagcagtatcttgatgtcgtcggatacccgtttatgccaccatattggggcctggggttccacttgtgccgctggggatattcatccaccgccattacacgacaagttgttgagaatatgaccagggcacattttcctctggatgtacagtggaacgacctggactacatggatagtcgccgcgacttcaccttcaataaggatgggttcagagactttcctgctatggtccaagaacttcaccagggaggcaggaggtacatgatgatcgtagatccgggaatttcttcttctggcccagccggttcatacagaccgtatgacgaaggactgcgacgaggcgtctttatcacgaacgagactggtcagcctttgataggcaaggtttggccagggtccaccgctttcccggatttcacaaatcctgaggcactggcctggtgggaagatatggtcgccgagtttcacgaccaggtcccatttgacgggatgtggatcgacatgaacgagccatccaacttcattagaggaagtgtggatggctgtccgaataatgagctggaaaaccctccttacgtaccaggcgttgttggtgggactcttcaagctgcgacgatttgcgcatcctcccatcagttcctgtcaacccactataacttgcacaatctgtacgggacaacagaggctatcgccagtcatagggccctggtaaaagctagaggaacacgccctttcgttatctctcgctcaacttttgcaggccacggtaggtatgccggacattggaccggcgacgtctggagttcttgggaacagctggcttcctccgttccagagatattgcagtttaacctgttgggagtcccacttgtaggtgcagatgtttgtggcttcctggggaacacctcagaagaattgtgcgtaagatggactcaactgggcgccttctacccttttatgcgcaatcacaactcactgacatctttgcctcaagaaccgtactcatttagtgagccagcacagcaggccatgaggaaggctcttggcctgagatatgcacttctgccgcatctgtacacccttttccaccaggctcatgtccatggagagactgttgcacgacctctgttcttggagttcccaaaagactcttccacgtggacagtcgatcaccagatgctgtggggcgaggctctgctgattacacctgtattgcaacctggtaaggccgaagttaccgggtactttccattggggacctggtatgatctgcaaacagtcccggttgaagctcttggaagtcttccacctccacctgctgcaccaagggagcctgcgatccactctgaaggacagtgggtaactttgcctgcaccgctggacaccatcaatgtccatctgcgcgaaggctacatcataccacttcaaggtcctggactgaccactacagagtctagaaaacaaccaatggctcttgctgttgcactgactaaacatggcgaagcaaggggtgagctgttctgggacgacggagagtcactggaggtactcgaacgaggcgcgtatacgcaggtcatttttgaggctcgcaataatacgatcgttaacgagctggtccacgtcacttcagaaggtgcaggccttcagttgggcaaggtaactgtcctgggagttgctacagcaccgcagcaggtcttgtccaacggacggcccgtaagcaactttacctatagtcctgataccaaagttctggacatctgcgttgctctgctgatgggtgagcagttcctggtatcatggtgc

SEQ ID NO: 550 - protein, 944 aa, synthetic construct
  REGION 1..944: note = Variant of the Homo Sapiens Lysosomal alpha-glucosidase
MEWSWVFLFFLSVTTGVHSGHILWHDFSTVPRELSGSSQVLEETHPAHQVGASRPGPRDAQLHPGRPRAVPTQCDVPENSRFDCAPEKAITQEQCEARGCCYIPAKQGLQGAQMGQPWCFFPPSYPSYKLENLSQSEMGYTATLTRTTPSFFPKDILTLRLDVMMETENRLHFTIKDPANRRYEVPLETPHVHSRAPSPLYSVEFSEEPFGVIVRRQLDGRVLLNTTVAPLFFADQFLQLSTSLPSQYITGLAEHLSPLMLSTSWNKITLWNRDLAPTPGANLYGSHPFYLALEDGGSAHGVFLLNSNAMDVVLQPSPALSWRSTGGILDVYIFLGPEPKSVVQQYLDVVGYPFMPPYWGLGFHLCRWGYSSTAITRQVVENMTRAHFPLDVQWNDLDYMDSRRDFTFNKDGFRDFPAMVQELHQGGRRYMMIVDPGISSSGPAGSYRPYDEGLRRGVFITNETGQPLIGKVWPGSTAFPDFTNPEALAWWEDMVAEFHDQVPFDGMWIDMNEPSNFIRGSVDGCPNNELENPPYVPGVVGGTLQAATICASSHQFLSTHYNLHNLYGTTEAIASHRALVKARGTRPFVISRSTFAGHGRYAGHWTGDVWSSWEQLASSVPEILQFNLLGVPLVGADVCGFLGNTSEELCVRWTQLGAFYPFMRNHNSLTSLPQEPYSFSEPAQQAMRKALGLRYALLPHLYTLFHQAHVHGETVARPLFLEFPKDSSTWTVDHQMLWGEALLITPVLQPGKAEVTGYFPLGTWYDLQTVPVEALGSLPPPPAAPREPAIHSEGQWVTLPAPLDTINVHLREGYIIPLQGPGLTTTESRKQPMALAVALTKHGEARGELFWDDGESLEVLERGAYTQVIFEARNNTIVNELVHVTSEGAGLQLGKVTVLGVATAPQQVLSNGRPVSNFTYSPDTKVLDICVALLMGEQFLVSWC

SEQ ID NO: 551 - DNA, 2832 bp, synthetic construct
  misc_feature 1..2832: note = Variant of the Homo Sapiens Lysosomal alpha-glucosidase
  source 1..2832: mol_type = other DNA
atggaatggagctgggtctttctcttcttcctgtcagtaacgactggtgtccactccggacacattctgtggcatgatttttctaccgtgcctagagagctttccggttcaagtcaagtcctcgaagaaacacatccagcccatcaggttggcgcatctaggccgggccctcgggacgctcaactccacccagggagacctagggccgttcccactcagtgcgacgtgccagagaactcacgcttcgattgtgcacctgagaaggctatcacgcaagagcagtgcgaggcccgcggatgttgttacataccggctaaacaggggctgcagggtgcgcagatgggccaaccttggtgcttcttcccaccatcctatccgagttacaagctggagaatctctcccagtctgaaatgggatataccgcaacactgactcggaccaccccctccttctttcccaaagatatcttgactctgagacttgacgtaatgatggagacagaaaacaggctccactttaccattaaggaccctgccaatcgccgatacgaggtgcctctggaaacaccacacgtgcacagtagagctccatcacctctgtattctgtcgagttctccgaagagccgtttggcgttatcgtcaggaggcagctcgacgggcgagtgcttctgaacacgactgtggccccgttgttctttgcggatcagtttctgcaactgtcaacaagtctcccttctcagtacattaccgggcttgcagagcatctgtccccactcatgctgagtacttcatggaacaaaatcacactgtggaatagagaccttgctcctactccaggagccaacttgtatggttctcaccctttctacttggccctggaagatggcggatcagcgcatggcgtattcctcctgaattccaacgcaatggacgttgttcttcagccatctcctgctttgagttggagatctacaggcgggatactggacgtctacatctttctgggtccagagcctaaatccgtagtgcagcagtatcttgatgtcgtcggatacccgtttatgccaccatattggggcctggggttccacttgtgccgctggggatattcatccaccgccattacacgacaagttgttgagaatatgaccagggcacattttcctctggatgtacagtggaacgacctggactacatggatagtcgccgcgacttcaccttcaataaggatgggttcagagactttcctgctatggtccaagaacttcaccagggaggcaggaggtacatgatgatcgtagatccgggaatttcttcttctggcccagccggttcatacagaccgtatgacgaaggactgcgacgaggcgtctttatcacgaacgagactggtcagcctttgataggcaaggtttggccagggtccaccgctttcccggatttcacaaatcctgaggcactggcctggtgggaagatatggtcgccgagtttcacgaccaggtcccatttgacgggatgtggatcgacatgaacgagccatccaacttcattagaggaagtgtggatggctgtccgaataatgagctggaaaaccctccttacgtaccaggcgttgttggtgggactcttcaagctgcgacgatttgcgcatcctcccatcagttcctgtcaacccactataacttgcacaatctgtacgggacaacagaggctatcgccagtcatagggccctggtaaaagctagaggaacacgccctttcgttatctctcgctcaacttttgcaggccacggtaggtatgccggacattggaccggcgacgtctggagttcttgggaacagctggcttcctccgttccagagatattgcagtttaacctgttgggagtcccacttgtaggtgcagatgtttgtggcttcctggggaacacctcagaagaattgtgcgtaagatggactcaactgggcgccttctacccttttatgcgcaatcacaactcactgacatctttgcctcaagaaccgtactcatttagtgagccagcacagcaggccatgaggaaggctcttatgctgagatatgcacttctgccgcatctgtacacccttttccaccaggctcatgtccatggagagactgttgcacgacctctgttcttggagttcccaaaagactcttccacgtggacagtcgatcaccagatgctgtggggcgaggctctgctgattacacctgtattgcaacctggtaaggccgaagttaccgggtactttccattggggacctggtatgatctgcaaacagtcccggttgaagctcttggaagtcttccacctccacctgctgcaccaagggagcctgcgatccactctgaaggacagtgggtaactttgcctgcaccgctggacaccatcaatgtccatctgcgcgaaggctacatcataccacttcaaggtcctggactgaccactacagagtctagaaaacaaccaatggctcttgctgttgcactgactaaaagcggcgaagcaaggggtgagctgttctgggacgacggagagtcactggaggtactcgaacgaggcgcgtatacgcaggtcatttttgaggctcgcaataatacgatcgttaacgagctggtccacgtcacttcagaaggtgcaggccttcagttgggcaaggtaactgtcctgggagttgctacagcaccgcagcaggtcttgtccaacggacggcccgtaagcaactttacctatagtcctgataccaaagttctggacatctgcgttgctctgctgatgggtgagcagttcctggtatcatggtgc

SEQ ID NO: 552 - protein, 944 aa, synthetic construct
  REGION 1..944: note = Variant of the Homo Sapiens Lysosomal alpha-glucosidase
MEWSWVFLFFLSVTTGVHSGHILWHDFSTVPRELSGSSQVLEETHPAHQVGASRPGPRDAQLHPGRPRAVPTQCDVPENSRFDCAPEKAITQEQCEARGCCYIPAKQGLQGAQMGQPWCFFPPSYPSYKLENLSQSEMGYTATLTRTTPSFFPKDILTLRLDVMMETENRLHFTIKDPANRRYEVPLETPHVHSRAPSPLYSVEFSEEPFGVIVRRQLDGRVLLNTTVAPLFFADQFLQLSTSLPSQYITGLAEHLSPLMLSTSWNKITLWNRDLAPTPGANLYGSHPFYLALEDGGSAHGVFLLNSNAMDVVLQPSPALSWRSTGGILDVYIFLGPEPKSVVQQYLDVVGYPFMPPYWGLGFHLCRWGYSSTAITRQVVENMTRAHFPLDVQWNDLDYMDSRRDFTFNKDGFRDFPAMVQELHQGGRRYMMIVDPGISSSGPAGSYRPYDEGLRRGVFITNETGQPLIGKVWPGSTAFPDFTNPEALAWWEDMVAEFHDQVPFDGMWIDMNEPSNFIRGSVDGCPNNELENPPYVPGVVGGTLQAATICASSHQFLSTHYNLHNLYGTTEAIASHRALVKARGTRPFVISRSTFAGHGRYAGHWTGDVWSSWEQLASSVPEILQFNLLGVPLVGADVCGFLGNTSEELCVRWTQLGAFYPFMRNHNSLTSLPQEPYSFSEPAQQAMRKALMLRYALLPHLYTLFHQAHVHGETVARPLFLEFPKDSSTWTVDHQMLWGEALLITPVLQPGKAEVTGYFPLGTWYDLQTVPVEALGSLPPPPAAPREPAIHSEGQWVTLPAPLDTINVHLREGYIIPLQGPGLTTTESRKQPMALAVALTKSGEARGELFWDDGESLEVLERGAYTQVIFEARNNTIVNELVHVTSEGAGLQLGKVTVLGVATAPQQVLSNGRPVSNFTYSPDTKVLDICVALLMGEQFLVSWC

SEQ ID NO: 553 - DNA, 2832 bp, synthetic construct
  misc_feature 1..2832: note = Variant of the Homo Sapiens Lysosomal alpha-glucosidase
  source 1..2832: mol_type = other DNA
atggaatggagctgggtctttctcttcttcctgtcagtaacgactggtgtccactccggacacattctgtggcatgatttttctcaggtgcctagagagctttccggttcaagtcaagtcctcgaagaaacacatccagcccatcaggttggcgcatctaggccgggccctcgggacgctcaactccacccagggagacctagggccgttcccactcagtgcgacgtgccagagaactcacgcttcgattgtgcacctgagaaggctatcacgcaagagcagtgcgaggcccgcggatgttgttacataccggctaaacaggggctgcagggtgcgcagatgggccaaccttggtgcttcttcccaccatcctatccgagttacaagctggagaatctctcccagtctgaaatgggatataccgcaacactgactcggaccaccccctccttctttcccaaagatatcttgactctgagacttgacgtaatgatggagacagaaaacaggctccactttaccattaaggaccctgccaatcgccgatacgaggtgcctctggaaacaccacacgtgcacagtagagctccatcacctctgtattctgtcgagttctccgaagagccgtttggcgttatcgtcaggaggcagctcgacgggcgagtgcttctgaacacgactgtggccccgttgttctttgcggatcagtttctgcaactgtcaacaagtctcccttctcagtacattaccgggcttgcagagcatctgtccccactcatgctgagtacttcatggaacaaaatcacactgtggaatagagaccttgctcctactccaggagccaacttgtatggttctcaccctttctacttggccctggaagatggcggatcagcgcatggcgtattcctcctgaattccaacgcaatggacgttgttcttcagccatctcctgctttgagttggagatctacaggcgggatactggacgtctacatctttctgggtccagagcctaaatccgtagtgcagcagtatcttgatgtcgtcggatacccgtttatgccaccatattggggcctggggttccacttgtgccgctggggatattcatccaccgccattacacgacaagttgttgagaatatgaccagggcacattttcctctggatgtacagtggaacgacctggactacatggatagtcgccgcgacttcaccttcaataaggatgggttcagagactttcctgctatggtccaagaacttcaccagggaggcaggaggtacatgatgatcgtagatccgggaatttcttcttctggcccagccggttcatacagaccgtatgacgaaggactgcgacgaggcgtctttatcacgaacgagactggtcagcctttgataggcaaggtttggccagggtccaccgctttcccggatttcacaaatcctgaggcactggcctggtgggaagatatggtcgccgagtttcacgaccaggtcccatttgacgggatgtggatcgacatgaacgagccatccaacttcattagaggaagtgtggatggctgtccgaataatgagctggaaaaccctccttacgtaccaggcgttgttggtgggactcttcaagctgcgacgatttgcgcatcctcccatcagttcctgtcaacccactataacttgcacaatctgtacgggacaacagaggctatcgccagtcatagggccctggtaaaagctagaggaacacgccctttcgttatctctcgctcaacttttgcaggccacggtaggtatgccggacattggaccggcgacgtctggagttcttgggaacagctggcttcctccgttccagagatattgcagtttaacctgttgggagtcccacttgtaggtgcagatgtttgtggcttcctggggaacacctcagaagaattgtgcgtaagatggactcaactgggcgccttctacccttttatgcgcaatcacaactcactgacatctttgcctcaagaaccgtactcatttagtgagccagcacagcaggccatgaggaaggctcttggcctgagatatgcacttctgccgcatctgtacacccttttccaccaggctcatgtccatggagagactgttgcacgacctctgttcttggagttcccaaaagactcttccacgtggacagtcgatcaccagatgctgtggggcgaggctctgctgattacacctgtattgcaacctggtaaggccgaagttaccgggtactttccattggggacctggtatgatctgcaaacagtcccggttgaagctcttggaagtcttccacctccacctgctgcaccaagggagcctgcgatccactctgaaggacagtgggtaactttgcctgcaccgctggacaccatcaatgtccatctgcgcgaaggctacatcataccacttcaaggtcctggactgaccactacagagtctagaaaacaaccaatggctcttgctgttgcactgactaaaagcggcgaagcaaggggtgagctgttctgggacgacggagagtcactggaggtactcgaacgaggcgcgtatacgcaggtcatttttgaggctcgcaataatacgatcgttaacgagctggtccacgtcacttcagaaggtgcaggccttcagttgggcaaggtaactgtcctgggagttgctacagcaccgcagcaggtcttgtccaacggacggcccgtaagcaactttacctatagtcctgataccaaagttctggacatctgcgttgctctgctgatgggtgagcagttcctggtatcatggtgc

SEQ ID NO: 554 - protein, 944 aa, synthetic construct
  REGION 1..944: note = Variant of the Homo Sapiens Lysosomal alpha-glucosidase
MEWSWVFLFFLSVTTGVHSGHILWHDFSQVPRELSGSSQVLEETHPAHQVGASRPGPRDAQLHPGRPRAVPTQCDVPENSRFDCAPEKAITQEQCEARGCCYIPAKQGLQGAQMGQPWCFFPPSYPSYKLENLSQSEMGYTATLTRTTPSFFPKDILTLRLDVMMETENRLHFTIKDPANRRYEVPLETPHVHSRAPSPLYSVEFSEEPFGVIVRRQLDGRVLLNTTVAPLFFADQFLQLSTSLPSQYITGLAEHLSPLMLSTSWNKITLWNRDLAPTPGANLYGSHPFYLALEDGGSAHGVFLLNSNAMDVVLQPSPALSWRSTGGILDVYIFLGPEPKSVVQQYLDVVGYPFMPPYWGLGFHLCRWGYSSTAITRQVVENMTRAHFPLDVQWNDLDYMDSRRDFTFNKDGFRDFPAMVQELHQGGRRYMMIVDPGISSSGPAGSYRPYDEGLRRGVFITNETGQPLIGKVWPGSTAFPDFTNPEALAWWEDMVAEFHDQVPFDGMWIDMNEPSNFIRGSVDGCPNNELENPPYVPGVVGGTLQAATICASSHQFLSTHYNLHNLYGTTEAIASHRALVKARGTRPFVISRSTFAGHGRYAGHWTGDVWSSWEQLASSVPEILQFNLLGVPLVGADVCGFLGNTSEELCVRWTQLGAFYPFMRNHNSLTSLPQEPYSFSEPAQQAMRKALGLRYALLPHLYTLFHQAHVHGETVARPLFLEFPKDSSTWTVDHQMLWGEALLITPVLQPGKAEVTGYFPLGTWYDLQTVPVEALGSLPPPPAAPREPAIHSEGQWVTLPAPLDTINVHLREGYIIPLQGPGLTTTESRKQPMALAVALTKSGEARGELFWDDGESLEVLERGAYTQVIFEARNNTIVNELVHVTSEGAGLQLGKVTVLGVATAPQQVLSNGRPVSNFTYSPDTKVLDICVALLMGEQFLVSWC

SEQ ID NO: 555 - DNA, 2832 bp, synthetic construct
  misc_feature 1..2832: note = Variant of the Homo Sapiens Lysosomal alpha-glucosidase
  source 1..2832: mol_type = other DNA
atggaatggagctgggtctttctcttcttcctgtcagtaacgactggtgtccactccggacacattctgtggcatgatttttctaccgtgcctagagagctttccggttcaagtcaagtcctcgaagaaacacatccagcccatcaggttggcgcatctaggccgggccctcgggacgctcaactccacccagggagacctagggccgttcccactcagtgcgacgtgccagagaactcacgcttcgattgtgcacctgagaaggctatcacgcaagagcagtgcgaggcccgcggatgttgttacataccggctaaacaggggctgcagggtgcgcagatgggccaaccttggtgcttcttcccaccatcctatccgagttacaagctggagaatctctcccagtctgaaatgggatataccgcaacactgactcggaccaccccctccttctttcccaaagatatcttgactctgagacttgacgtaatgatggagacagaaaacaggctccactttaccattaaggaccctgccaatcgccgatacgaggtgcctctggaaacaccacacgtgcacagtagagctccatcacctctgtattctgtcgagttctccgaagagccgtttggcgttatcgtcaggaggcagctcgacgggcgagtgcttctgaacacgactgtggccccgttgttctttgcggatcagtttctgcaactgtcaacaagtctcccttctcagtacattaccgggcttgcagagcatctgtccccactcatgctgagtacttcatggaacaaaatcacactgtggaatagagaccttgctcctactccaggagccaacttgtatggttctcaccctttctacttggccctggaagatggcggatcagcgcatggcgtattcctcctgaattccaacgcaatggacgttgttcttcagccatctcctgctttgagttggagatctacaggcgggatactggacgtctacatctttctgggtccagagcctaaatccgtagtgcagcagtatcttgatgtcgtcggatacccgtttatgccaccatattggggcctggggttccacttgtgccgctggggatattcatccaccgccattacacgacaagttgttgagaatatgaccagggcacattttcctctggatgtacagtggaacgacctggactacatggatagtcgccgcgacttcaccttcaataaggatgggttcagagactttcctgctatggtccaagaacttcaccagggaggcaggaggtacatgatgatcgtagatccgggaatttcttcttctggcccagccggttcatacagaccgtatgacgaaggactgcgacgaggcgtctttatcacgaacgagactggtcagcctttgataggcaaggtttggccagggtccaccgctttcccggatttcacaaatcctgaggcactggcctggtgggaagatatggtcgccgagtttcacgaccaggtcccatttgacgggatgtggatcgacatgaacgagccatccaacttcattagaggaagtgtggatggctgtccgaataatgagctggaaaaccctccttacgtaccaggcgttgttggtgggactcttcaagctgcgacgatttgcgcatcctcccatcagttcctgtcaacccactataacttgcacaatctgtacgggacaacagaggctatcgccagtcatagggccctggtaaaagctagaggaacacgccctttcgttatctctcgctcaacttttgcaggccacggtaggtatgccggacattggaccggcgacgtctggagttcttgggaacagctggcttcctccgttccagagatattgcagtttaacctgttgggagtcccacttgtaggtgcagatgtttgtggcttcctggggaacacctcagaagaattgtgcgtaagatggactcaactgggcgccttctacccttttatgcgcaatcacaactcactgacatctttgcctcaagaaccgtactcatttagtgagccagcacagcaggccatgaggaaggctcttggcctgagatatgcacttctgccgcatctgtacacccttttccaccaggctcatgtccatggagagactgttgcacgacctctgttcttggagttcccaaaagactcttccacgtggacagtcgatcaccagatgctgtggggcgaggctctgctgattacacctgtattgcaacctggtaaggccgaagttaccgggtactttccattggggacctggtatgatctgcaaacagtcccggttgaagctcttggaagtcttccacctccacctgctgcaccaagggagcctgcgatccactctgaaggacagtgggtaactttgcctgcaccgctggacaccatcaatgtccatctgcgcgaaggctacatcataccacttcaaggtcctggactgaccactacagagtctagaaaacaaccaatggctcttgctgttgcactgactaaaagcggcgaagcaaggggtgagctgttctgggacgacggagagtcactggaggtactcgaacgaggcgcgtatacgcaggtcatttttgaggctcgcaataatacgatcgttaacgagctggtccacgtcacttcagaaggtgcaggccttcagttggacaaggtaactgtcctgggagttgctacagcaccgcagcaggtcttgtccaacggacggcccgtaagcaactttacctatagtcctgataccaaagttctggacatctgcgttgctctgctgatgggtgagcagttcctggtatcatggtgc

SEQ ID NO: 556 - protein, 944 aa, synthetic construct
  REGION 1..944: note = Variant of the Homo Sapiens Lysosomal alpha-glucosidase
MEWSWVFLFFLSVTTGVHSGHILWHDFSTVPRELSGSSQVLEETHPAHQVGASRPGPRDAQLHPGRPRAVPTQCDVPENSRFDCAPEKAITQEQCEARGCCYIPAKQGLQGAQMGQPWCFFPPSYPSYKLENLSQSEMGYTATLTRTTPSFFPKDILTLRLDVMMETENRLHFTIKDPANRRYEVPLETPHVHSRAPSPLYSVEFSEEPFGVIVRRQLDGRVLLNTTVAPLFFADQFLQLSTSLPSQYITGLAEHLSPLMLSTSWNKITLWNRDLAPTPGANLYGSHPFYLALEDGGSAHGVFLLNSNAMDVVLQPSPALSWRSTGGILDVYIFLGPEPKSVVQQYLDVVGYPFMPPYWGLGFHLCRWGYSSTAITRQVVENMTRAHFPLDVQWNDLDYMDSRRDFTFNKDGFRDFPAMVQELHQGGRRYMMIVDPGISSSGPAGSYRPYDEGLRRGVFITNETGQPLIGKVWPGSTAFPDFTNPEALAWWEDMVAEFHDQVPFDGMWIDMNEPSNFIRGSVDGCPNNELENPPYVPGVVGGTLQAATICASSHQFLSTHYNLHNLYGTTEAIASHRALVKARGTRPFVISRSTFAGHGRYAGHWTGDVWSSWEQLASSVPEILQFNLLGVPLVGADVCGFLGNTSEELCVRWTQLGAFYPFMRNHNSLTSLPQEPYSFSEPAQQAMRKALGLRYALLPHLYTLFHQAHVHGETVARPLFLEFPKDSSTWTVDHQMLWGEALLITPVLQPGKAEVTGYFPLGTWYDLQTVPVEALGSLPPPPAAPREPAIHSEGQWVTLPAPLDTINVHLREGYIIPLQGPGLTTTESRKQPMALAVALTKSGEARGELFWDDGESLEVLERGAYTQVIFEARNNTIVNELVHVTSEGAGLQLDKVTVLGVATAPQQVLSNGRPVSNFTYSPDTKVLDICVALLMGEQFLVSWC

SEQ ID NO: 557 - DNA, 2832 bp, synthetic construct
  misc_feature 1..2832: note = Variant of the Homo Sapiens Lysosomal alpha-glucosidase
  source 1..2832: mol_type = other DNA
atggaatggagctgggtctttctcttcttcctgtcagtaacgactggtgtccactccggacacattctgtggcatgatttttctaccgtgcctagagagctttccggttcaagtcaagtcctcgaagaaacacatccagcccatcaggttggcgcatctaggccgggccctcgggacgctcaactccacccagggagacctagggccgttcccactcagtgcgacgtgccagagaactcacgcttcgattgtgcacctgagaaggctatcacgcaagagcagtgcgaggcccgcggatgttgttacataccggctaaacaggggctgcagggtgcgcagatgggccaaccttggtgcttcttcccaccatcctatccgagttacaagctggagaatctctcccagtctgaaatgggatataccgcaacactgactcggaccaccccctccttctttcccaaagatatcttgactctgagacttgacgtaatgatggagacagaaaacaggctccactttaccattaaggaccctgccaatcgccgatacgaggtgcctctggaaacaccacacgtgcacagtagagctccatcacctctgtattctgtcgagttctccgaagagccgtttggcgttatcgtcaggaggcagctcgacgggcgagtgcttctgaacacgactgtggccccgttgttctttgcggatcagtttctgcaactgtcaacaagtctcccttctcagtacattaccgggcttgcagagcatctgtccccactcatgctgagtacttcatggaacaaaatcacactgtggaatagagaccttgctcctactccaggagccaacttgtatggttctcaccctttctacttggccctggaagatggcggatcagcgcatggcgtattcctcctgaattccaacgcaatggacgttgttcttcagccatctcctgctttgagttggagatctacaggcgggatactggacgtctacatctttctgggtccagagcctaaatccgtagtgcagcagtatcttgatgtcgtcggatacccgtttatgccaccatattggggcctggggttccacttgtgccgctggggatattcatccaccgccattacacgacaagttgttgagaatatgaccagggcacattttcctctggatgtacagtggaacgacctggactacatggatagtcgccgcgacttcaccttcaataaggatgggttcagagactttcctgctatggtccaagaacttcaccagggaggcaggaggtacatgatgatcgtagatccgggaatttcttcttctggcccagccggttcatacagaccgtatgacgaaggactgcgacgaggcgtctttatcacgaacgagactggtcagcctttgataggcaaggtttggccagggtccaccgctttcccggatttcacaaatcctgaggcactggcctggtgggaagatatggtcgccgagtttcacgaccaggtcccatttgacgggatgtggatcgacatgaacgagccatccaacttcattagaggaagtgtggatggctgtccgaataatgagctggaaaaccctccttacgtaccaggcgttgttggtgggactcttcaagctgcgacgatttgcgcatcctcccatcagttcctgtcaacccactataacttgcacaatctgtacgggacaacagaggctatcgccagtcatagggccctggtaaaagctagaggaacacgccctttcgttatctctcgctcaacttttgcaggccacggtaggtatgccggacattggaccggcgacgtctggagttcttgggaacagctggcttcctccgttccagagatattgcagtttaacctgttgggagtcccacttgtaggtgcagatgtttgtggcttcctggggaacacctcagaagaattgtgcgtaagatggactcaactgggcgccttctacccttttatgcgcaatcacaactcactgacatctttgcctcaagaaccgtactcatttagtgagccagcacagcaggccatgaggaaggctcttggcctgagatatgcacttctgccgcatctgtacacccttttccaccaggctcatgtccatggagagactgttgcacgacctctgttcttggagttcccaaaagactcttccacgtggacagtcgatcaccagatgctgtggggcgaggctctgctgattacacctgtattgcaacctggtaaggccgaagttaccgggtactttccattggggacctggtatgatctgcaaacagtcccggttgaagctcttggaagtcttccacctccacctgctgcaccaagggagcctgcgatccactctgaaggacagtgggtaactttgcctgcaccgctggacaccatcaatgtccatctgcgcgaaggctacatcataccacttcaaggtcctggactgaccactacagagtctagaaaacaaccaatggctcttgctgttgcactgactaaaagcggcgaagcaaggggtgagctgttctgggacgacggagagtcactggaggtactcgaacgaggcgcgtatacgcaggtcatttttgaggctcgcaataatacgatcgttaacgagctggtccacgtcacttcagaaggtgcaggccttcagttgggcaaggtaactgtcctgggagttgctacagcaccgcagcaggtcttgtccaacggatttcccgtaagcaactttacctatagtcctgataccaaagttctggacatctgcgttgctctgctgatgggtgagcagttcctggtatcatggtgc

SEQ ID NO: 558 - protein, 944 aa, synthetic construct
  REGION 1..944: note = Variant of the Homo Sapiens Lysosomal alpha-glucosidase
MEWSWVFLFFLSVTTGVHSGHILWHDFSTVPRELSGSSQVLEETHPAHQVGASRPGPRDAQLHPGRPRAVPTQCDVPENSRFDCAPEKAITQEQCEARGCCYIPAKQGLQGAQMGQPWCFFPPSYPSYKLENLSQSEMGYTATLTRTTPSFFPKDILTLRLDVMMETENRLHFTIKDPANRRYEVPLETPHVHSRAPSPLYSVEFSEEPFGVIVRRQLDGRVLLNTTVAPLFFADQFLQLSTSLPSQYITGLAEHLSPLMLSTSWNKITLWNRDLAPTPGANLYGSHPFYLALEDGGSAHGVFLLNSNAMDVVLQPSPALSWRSTGGILDVYIFLGPEPKSVVQQYLDVVGYPFMPPYWGLGFHLCRWGYSSTAITRQVVENMTRAHFPLDVQWNDLDYMDSRRDFTFNKDGFRDFPAMVQELHQGGRRYMMIVDPGISSSGPAGSYRPYDEGLRRGVFITNETGQPLIGKVWPGSTAFPDFTNPEALAWWEDMVAEFHDQVPFDGMWIDMNEPSNFIRGSVDGCPNNELENPPYVPGVVGGTLQAATICASSHQFLSTHYNLHNLYGTTEAIASHRALVKARGTRPFVISRSTFAGHGRYAGHWTGDVWSSWEQLASSVPEILQFNLLGVPLVGADVCGFLGNTSEELCVRWTQLGAFYPFMRNHNSLTSLPQEPYSFSEPAQQAMRKALGLRYALLPHLYTLFHQAHVHGETVARPLFLEFPKDSSTWTVDHQMLWGEALLITPVLQPGKAEVTGYFPLGTWYDLQTVPVEALGSLPPPPAAPREPAIHSEGQWVTLPAPLDTINVHLREGYIIPLQGPGLTTTESRKQPMALAVALTKSGEARGELFWDDGESLEVLERGAYTQVIFEARNNTIVNELVHVTSEGAGLQLGKVTVLGVATAPQQVLSNGFPVSNFTYSPDTKVLDICVALLMGEQFLVSWC

SEQ ID NO: 559 - DNA, 2832 bp, synthetic construct
  misc_feature 1..2832: note = Variant of the Homo Sapiens Lysosomal alpha-glucosidase
  source 1..2832: mol_type = other DNA
atggaatggagctgggtctttctcttcttcctgtcagtaacgactggtgtccactccggacacattctgtggcatgatttttctaccgtgcctagagagctttccggttcaagtcaagtcctcgaagaaacacatccagcccatcaggttggcgcatctaggccgggccctcgggacgctcaactccacccagggagacctagggccgttcccactcagtgcgacgtgccagagaactcacgcttcgattgtgcacctgagaaggctatcacgcaagagcagtgcgaggcccgcggatgttgttacataccggctaaacaggggctgcagggtgcgcagatgggccaaccttggtgcttcttcccaccatcctatccgagttacaagctggagaatctctcccagtctgaaatgggatataccgcaacactgactcggaccaccccctccttctttcccaaagatatcttgactctgagacttgacgtaatgatggagacagaaaacaggctccactttaccattaaggaccctgccaatcgccgatacgaggtgcctctggaaacaccacacgtgcacagtagagctccatcacctctgtattctgtcgagttctccgaagagccgtttggcgttatcgtcaggaggcagctcgacgggcgagtgcttctgaacacgactgtggccccgttgttctttgcggatcagtttctgcaactgtcaacaagtctcccttctcagtacattaccgggcttgcagagcatctgtccccactcatgctgagtacttcatggaacaaaatcacactgtggaatagagaccttgctcctactccaggagccaacttgtatggttctcaccctttctacttggccctggaagatggcggatcagcgcatggcgtattcctcctgaattccaacgcaatggacgttgttcttcagccatctcctgctttgagttggagatctacaggcgggatactggacgtctacatctttctgggtccagagcctaaatccgtagtgcagcagtatcttgatgtcgtcggatacccgtttatgccaccatattggggcctggggttccacttgtgccgctggggatattcatccaccgccattacacgacaagttgttgagaatatgaccagggcacattttcctctggatgtacagtggaacgacctggactacatggatagtcgccgcgacttcaccttcaataaggatgggttcagagactttcctgctatggtccaagaacttcaccagggaggcaggaggtacatgatgatcgtagatccgggaatttcttcttctggcccagccggttcatacagaccgtatgacgaaggactgcgacgaggcgtctttatcacgaacgagactggtcagcctttgataggcaaggtttggccagggtccaccgctttcccggatttcacaaatcctgaggcactggcctggtgggaagatatggtcgccgagtttcacgaccaggtcccatttgacgggatgtggatcgacatgaacgagccatccaacttcattagaggaagtgtggatggctgtccgaataatgagctggaaaaccctccttacgtaccaggcgttgttggtgggactcttcaagctgcgacgatttgcgcatcctcccatcagttcctgtcaacccactataacttgcacaatctgtacgggacaacagaggctatcgccagtcatagggccctggtaaaagctagaggaacacgccctttcgttatctctcgctcaacttttgcaggccacggtaggtatgccggacattggaccggcgacgtctggagttcttgggaacagctggcttcctccgttccagagatattgcagtttaacctgttgggagtcccacttgtaggtgcagatgtttgtggcttcctggggaacacctcagaagaattgtgcgtaagatggactcaactgggcgccttctacccttttatgcgcaatcacaactcactggattctttgcctcaagaaccgtactcatttagtgagccagcacagcaggccatgaggaaggctcttggcctgagatatgcacttctgccgcatctgtacacccttttccaccaggctcatgtccatggagagactgttgcacgacctctgttcttggagttcccaaaagactcttccacgtggacagtcgatcaccagatgctgtggggcgaggctctgctgattacacctgtattgcaacctggtaaggccgaagttaccgggtactttccattggggacctggtatgatctgcaaacagtcccggttgaagctcttggaagtcttccacctccacctgctgcaccaagggagcctgcgatccactctgaaggacagtgggtaactttgcctgcaccgctggacaccatcaatgtccatctgcgcgaaggctacatcataccacttcaaggtcctggactgaccactacagagtctagaaaacaaccaatggctcttgctgttgcactgactaaaagcggcgaagcaaggggtgagctgttctgggacgacggagagtcactggaggtactcgaacgaggcgcgtatacgcaggtcatttttgaggctcgcaataatacgatcgttaacgagctggtccacgtcacttcagaaggtgcaggccttcagttgggcaaggtaactgtcctgggagttgctacagcaccgcagcaggtcttgtccaacggacggcccgtaagcaactttacctatagtcctgataccaaagttctggacatctgcgttgctctgctgatgggtgagcagttcctggtatcatggtgc

SEQ ID NO: 560 - protein, 944 aa, synthetic construct
  REGION 1..944: note = Variant of the Homo Sapiens Lysosomal alpha-glucosidase
MEWSWVFLFFLSVTTGVHSGHILWHDFSTVPRELSGSSQVLEETHPAHQVGASRPGPRDAQLHPGRPRAVPTQCDVPENSRFDCAPEKAITQEQCEARGCCYIPAKQGLQGAQMGQPWCFFPPSYPSYKLENLSQSEMGYTATLTRTTPSFFPKDILTLRLDVMMETENRLHFTIKDPANRRYEVPLETPHVHSRAPSPLYSVEFSEEPFGVIVRRQLDGRVLLNTTVAPLFFADQFLQLSTSLPSQYITGLAEHLSPLMLSTSWNKITLWNRDLAPTPGANLYGSHPFYLALEDGGSAHGVFLLNSNAMDVVLQPSPALSWRSTGGILDVYIFLGPEPKSVVQQYLDVVGYPFMPPYWGLGFHLCRWGYSSTAITRQVVENMTRAHFPLDVQWNDLDYMDSRRDFTFNKDGFRDFPAMVQELHQGGRRYMMIVDPGISSSGPAGSYRPYDEGLRRGVFITNETGQPLIGKVWPGSTAFPDFTNPEALAWWEDMVAEFHDQVPFDGMWIDMNEPSNFIRGSVDGCPNNELENPPYVPGVVGGTLQAATICASSHQFLSTHYNLHNLYGTTEAIASHRALVKARGTRPFVISRSTFAGHGRYAGHWTGDVWSSWEQLASSVPEILQFNLLGVPLVGADVCGFLGNTSEELCVRWTQLGAFYPFMRNHNSLDSLPQEPYSFSEPAQQAMRKALGLRYALLPHLYTLFHQAHVHGETVARPLFLEFPKDSSTWTVDHQMLWGEALLITPVLQPGKAEVTGYFPLGTWYDLQTVPVEALGSLPPPPAAPREPAIHSEGQWVTLPAPLDTINVHLREGYIIPLQGPGLTTTESRKQPMALAVALTKSGEARGELFWDDGESLEVLERGAYTQVIFEARNNTIVNELVHVTSEGAGLQLGKVTVLGVATAPQQVLSNGRPVSNFTYSPDTKVLDICVALLMGEQFLVSWC

SEQ ID NO: 561 - DNA, 2832 bp, synthetic construct
  misc_feature 1..2832: note = Variant of the Homo Sapiens Lysosomal alpha-glucosidase
  source 1..2832: mol_type = other DNA
atggaatggagctgggtctttctcttcttcctgtcagtaacgactggtgtccactccggacacattctgtggcatgatttttctaccgtgcctagagagctttccggttcaagtcaagtcctcgaagaaacacatccagcccatcaggttggcgcatctaggccgggccctcgggacgctcaaatgcacccagggagacctagggccgttcccactcagtgcgacgtgccagagaactcacgcttcgattgtgcacctgagaaggctatcacgcaagagcagtgcgaggcccgcggatgttgttacataccggctaaacaggggctgcagggtgcgcagatgggccaaccttggtgcttcttcccaccatcctatccgagttacaagctggagaatctctcccagtctgaaatgggatataccgcaacactgactcggaccaccccctccttctttcccaaagatatcttgactctgagacttgacgtaatgatggagacagaaaacaggctccactttaccattaaggaccctgccaatcgccgatacgaggtgcctctggaaacaccacacgtgcacagtagagctccatcacctctgtattctgtcgagttctccgaagagccgtttggcgttatcgtcaggaggcagctcgacgggcgagtgcttctgaacacgactgtggccccgttgttctttgcggatcagtttctgcaactgtcaacaagtctcccttctcagtacattaccgggcttgcagagcatctgtccccactcatgctgagtacttcatggaacaaaatcacactgtggaatagagaccttgctcctactccaggagccaacttgtatggttctcaccctttctacttggccctggaagatggcggatcagcgcatggcgtattcctcctgaattccaacgcaatggacgttgttcttcagccatctcctgctttgagttggagatctacaggcgggatactggacgtctacatctttctgggtccagagcctaaatccgtagtgcagcagtatcttgatgtcgtcggatacccgtttatgccaccatattggggcctggggttccacttgtgccgctggggatattcatccaccgccattacacgacaagttgttgagaatatgaccagggcacattttcctctggatgtacagtggaacgacctggactacatggatagtcgccgcgacttcaccttcaataaggatgggttcagagactttcctgctatggtccaagaacttcaccagggaggcaggaggtacatgatgatcgtagatccgggaatttcttcttctggcccagccggttcatacagaccgtatgacgaaggactgcgacgaggcgtctttatcacgaacgagactggtcagcctttgataggcaaggtttggccagggtccaccgctttcccggatttcacaaatcctgaggcactggcctggtgggaagatatggtcgccgagtttcacgaccaggtcccatttgacgggatgtggatcgacatgaacgagccatccaacttcattagaggaagtgtggatggctgtccgaataatgagctggaaaaccctccttacgtaccaggcgttgttggtgggactcttcaagctgcgacgatttgcgcatcctcccatcagttcctgtcaacccactataacttgcacaatctgtacgggacaacagaggctatcgccagtcatagggccctggtaaaagctagaggaacacgccctttcgttatctctcgctcaacttttgcaggccacggtaggtatgccggacattggaccggcgacgtctggagttcttgggaacagctggcttcctccgttccagagatattgcagtttaacctgttgggagtcccacttgtaggtgcagatgtttgtggcttcctggggaacacctcagaagaattgtgcgtaagatggactcaactgggcgccttctacccttttatgcgcaatcacaactcactgacatctttgcctcaagaaccgtactcatttagtgagccagcacagcaggccatgaggaaggctcttggcctgagatatgcacttctgccgcatctgtacacccttttccaccaggctcatgtccatggagagactgttgcacgacctctgttcttggagttcccaaaagactcttccacgtggacagtcgatcaccagatgctgtggggcgaggctctgctgattacacctgtattgcaacctggtaaggccgaagttaccgggtactttccattggggacctggtatgatctgcaaacagtcccggttgaagctcttggaagtcttccacctccacctgctgcaccaagggagcctgcgatccactctgaaggacagtgggtaactttgcctgcaccgctggacaccatcaatgtccatctgcgcgaaggctacatcataccacttcaaggtcctggactgaccactacagagtctagaaaacaaccaatggctcttgctgttgcactgactaaaagcggcgaagcaaggggtgagctgttctgggacgacggagagtcactggaggtactcgaacgaggcgcgtatacgcaggtcatttttgaggctcgcaataatacgatcgttaacgagctggtccacgtcacttcagaaggtgcaggccttcagttgggcaaggtaactgtcctgggagttgctacagcaccgcagcaggtcttgtccaacggacggcccgtaagcaactttacctatagtcctgataccaaagttctggacatctgcgttgctctgctgatgggtgagcagttcctggtatcatggtgc

SEQ ID NO: 562 - protein, 944 aa, synthetic construct
  REGION 1..944: note = Variant of the Homo Sapiens Lysosomal alpha-glucosidase
MEWSWVFLFFLSVTTGVHSGHILWHDFSTVPRELSGSSQVLEETHPAHQVGASRPGPRDAQMHPGRPRAVPTQCDVPENSRFDCAPEKAITQEQCEARGCCYIPAKQGLQGAQMGQPWCFFPPSYPSYKLENLSQSEMGYTATLTRTTPSFFPKDILTLRLDVMMETENRLHFTIKDPANRRYEVPLETPHVHSRAPSPLYSVEFSEEPFGVIVRRQLDGRVLLNTTVAPLFFADQFLQLSTSLPSQYITGLAEHLSPLMLSTSWNKITLWNRDLAPTPGANLYGSHPFYLALEDGGSAHGVFLLNSNAMDVVLQPSPALSWRSTGGILDVYIFLGPEPKSVVQQYLDVVGYPFMPPYWGLGFHLCRWGYSSTAITRQVVENMTRAHFPLDVQWNDLDYMDSRRDFTFNKDGFRDFPAMVQELHQGGRRYMMIVDPGISSSGPAGSYRPYDEGLRRGVFITNETGQPLIGKVWPGSTAFPDFTNPEALAWWEDMVAEFHDQVPFDGMWIDMNEPSNFIRGSVDGCPNNELENPPYVPGVVGGTLQAATICASSHQFLSTHYNLHNLYGTTEAIASHRALVKARGTRPFVISRSTFAGHGRYAGHWTGDVWSSWEQLASSVPEILQFNLLGVPLVGADVCGFLGNTSEELCVRWTQLGAFYPFMRNHNSLTSLPQEPYSFSEPAQQAMRKALGLRYALLPHLYTLFHQAHVHGETVARPLFLEFPKDSSTWTVDHQMLWGEALLITPVLQPGKAEVTGYFPLGTWYDLQTVPVEALGSLPPPPAAPREPAIHSEGQWVTLPAPLDTINVHLREGYIIPLQGPGLTTTESRKQPMALAVALTKSGEARGELFWDDGESLEVLERGAYTQVIFEARNNTIVNELVHVTSEGAGLQLGKVTVLGVATAPQQVLSNGRPVSNFTYSPDTKVLDICVALLMGEQFLVSWC

SEQ ID NO: 563 - DNA, 2832 bp, synthetic construct
  misc_feature 1..2832: note = Variant of the Homo Sapiens Lysosomal alpha-glucosidase
  source 1..2832: mol_type = other DNA
atggaatggagctgggtctttctcttcttcctgtcagtaacgactggtgtccactccggacacattctgtggcatgatttttctaccgtgcctagagagctttccggttcaagtcaagtcctcgaagaaacacatccagcccatcaggttggcgcatctaggccgggccctcgggacgctcaactccacccagggagacctagggccgttcccactcagtgcgacgtgccagagaactcacgcttcgattgtgcacctgagaaggctatcacgcaagagcagtgcgaggcccgcggatgttgttacataccggctaaacaggggctgcagggtgcgcagatgggccaaccttggtgcttcttcccaccatcctatccgagttacaagctggagaatctctcccagtctgaaatgggatataccgcaacactgactcggaccaccccctccttctttcccaaagatatcttgactctgagacttgacgtaatgatggagacagaaaacaggctccactttaccattaaggaccctgccaatcgccgatacgaggtgcctctggaaacaccacacgtgcacagtagagctccatcacctctgtattctgtcgagttctccgaagagccgtttggcgttatcgtcaggaggcagctcgacgggcgagtgcttctgaacacgactgtggccccgttgttctttgcggatcagtttctgcaactgtcaacaagtctcccttctcagtacattaccgggcttgcagagcatctgtccccactcatgctgagtacttcatggaacaaaatcacactgtggaatagagaccttgctcctactccaggagccaacttgtatggttctcaccctttctacttggccctggaagatggcggatcagcgcatggcgtattcctcctgaattccaacgcaatggacgttgttcttcagccatctcctgctttgagttggagatctacaggcgggatactggacgtctacatctttctgggtccagagcctaaatccgtagtgcagcagtatcttgatgtcgtcggatacccgtttatgccaccatattggggcctggggttccacttgtgccgctggggatattcatccaccgccattacacgacaagttgttgagaatatgaccagggcacattttcctctggatgtacagtggaacgacctggactacatggatagtcgccgcgacttcaccttcaataaggatgggttcagagactttcctgctatggtccaagaacttcaccagggaggcaggaggtacatgatgatcgtagatccgggaatttcttcttctggcccagccggttcatacagaccgtatgacgaaggactgcgacgaggcgtctttatcacgaacgagactggtcagcctttgataggcaaggtttggccagggtccaccgctttcccggatttcacaaatccttgtgcactggcctggtgggaagatatggtcgccgagtttcacgaccaggtcccatttgacgggatgtggatcgacatgaacgagccatccaacttcattagaggaagtgtggatggctgtccgaataatgagctggaaaaccctccttacgtaccaggcgttgttggtgggactcttcaagctgcgacgatttgcgcatcctcccatcagttcctgtcaacccactataacttgcacaatctgtacgggacaacagaggctatcgccagtcatagggccctggtaaaagctagaggaacacgccctttcgttatctctcgctcaacttttgcaggccacggtaggtatgccggacattggaccggcgacgtctggagttcttgggaacagctggcttcctccgttccagagatattgcagtttaacctgttgggagtcccacttgtaggtgcagatgtttgtggcttcctggggaacacctcagaagaattgtgcgtaagatggactcaactgggcgccttctacccttttatgcgcaatcacaactcactgacatctttgcctcaagaaccgtactcatttagtgagccagcacagcaggccatgaggaaggctcttggcctgagatatgcacttctgccgcatctgtacacccttttccaccaggctcatgtccatggagagactgttgcacgacctctgttcttggagttcccaaaagactcttccacgtggacagtcgatcaccagatgctgtggggcgaggctctgctgattacacctgtattgcaacctggtaaggccgaagttaccgggtactttccattggggacctggtatgatctgcaaacagtcccggttgaagctcttggaagtcttccacctccacctgctgcaccaagggagcctgcgatccactctgaaggacagtgggtaactttgcctgcaccgctggacaccatcaatgtccatctgcgcgaaggctacatcataccacttcaaggtcctggactgaccactacagagtctagaaaacaaccaatggctcttgctgttgcactgactaaaagcggcgaagcaaggggtgagctgttctgggacgacggagagtcactggaggtactcgaacgaggcgcgtatacgcaggtcatttttgaggctcgcaataatacgatcgttaacgagctggtccacgtcacttcagaaggtgcaggccttcagttgggcaaggtaactgtcctgggagttgctacagcaccgcagcaggtcttgtccaacggacggcccgtaagcaactttacctatagtcctgataccaaagttctggacatctgcgttgctctgctgatgggtgagcagttcctggtatcatggtgc

SEQ ID NO: 564 - protein, 944 aa, synthetic construct
  REGION 1..944: note = Variant of the Homo Sapiens Lysosomal alpha-glucosidase
MEWSWVFLFFLSVTTGVHSGHILWHDFSTVPRELSGSSQVLEETHPAHQVGASRPGPRDAQLHPGRPRAVPTQCDVPENSRFDCAPEKAITQEQCEARGCCYIPAKQGLQGAQMGQPWCFFPPSYPSYKLENLSQSEMGYTATLTRTTPSFFPKDILTLRLDVMMETENRLHFTIKDPANRRYEVPLETPHVHSRAPSPLYSVEFSEEPFGVIVRRQLDGRVLLNTTVAPLFFADQFLQLSTSLPSQYITGLAEHLSPLMLSTSWNKITLWNRDLAPTPGANLYGSHPFYLALEDGGSAHGVFLLNSNAMDVVLQPSPALSWRSTGGILDVYIFLGPEPKSVVQQYLDVVGYPFMPPYWGLGFHLCRWGYSSTAITRQVVENMTRAHFPLDVQWNDLDYMDSRRDFTFNKDGFRDFPAMVQELHQGGRRYMMIVDPGISSSGPAGSYRPYDEGLRRGVFITNETGQPLIGKVWPGSTAFPDFTNPCALAWWEDMVAEFHDQVPFDGMWIDMNEPSNFIRGSVDGCPNNELENPPYVPGVVGGTLQAATICASSHQFLSTHYNLHNLYGTTEAIASHRALVKARGTRPFVISRSTFAGHGRYAGHWTGDVWSSWEQLASSVPEILQFNLLGVPLVGADVCGFLGNTSEELCVRWTQLGAFYPFMRNHNSLTSLPQEPYSFSEPAQQAMRKALGLRYALLPHLYTLFHQAHVHGETVARPLFLEFPKDSSTWTVDHQMLWGEALLITPVLQPGKAEVTGYFPLGTWYDLQTVPVEALGSLPPPPAAPREPAIHSEGQWVTLPAPLDTINVHLREGYIIPLQGPGLTTTESRKQPMALAVALTKSGEARGELFWDDGESLEVLERGAYTQVIFEARNNTIVNELVHVTSEGAGLQLGKVTVLGVATAPQQVLSNGRPVSNFTYSPDTKVLDICVALLMGEQFLVSWC

SEQ ID NO: 565 - DNA, 2832 bp, synthetic construct
  misc_feature 1..2832: note = Variant of the Homo Sapiens Lysosomal alpha-glucosidase
  source 1..2832: mol_type = other DNA
atggaatggagctgggtctttctcttcttcctgtcagtaacgactggtgtccactccggacacattctgtggcatgatttttctaccgtgcctagagagctttccggttcaagtcaagtcctcgaagaaacacatccagcccatcaggttggcgcatctaggccgggccctcgggacgctcaactccacccagggagacctagggccgttcccactcagtgcgacgtgccaacaaactcacgcttcgattgtgcacctgagaaggctatcacgcaagagcagtgcgaggcccgcggatgttgttacataccggctaaacaggggctgcagggtgcgcagatgggccaaccttggtgcttcttcccaccatcctatccgagttacaagctggagaatctctcccagtctgaaatgggatataccgcaacactgactcggaccaccccctccttctttcccaaagatatcttgactctgagacttgacgtaatgatggagacagaaaacaggctccactttaccattaaggaccctgccaatcgccgatacgaggtgcctctggaaacaccacacgtgcacagtagagctccatcacctctgtattctgtcgagttctccgaagagccgtttggcgttatcgtcaggaggcagctcgacgggcgagtgcttctgaacacgactgtggccccgttgttctttgcggatcagtttctgcaactgtcaacaagtctcccttctcagtacattaccgggcttgcagagcatctgtccccactcatgctgagtacttcatggaacaaaatcacactgtggaatagagaccttgctcctactccaggagccaacttgtatggttctcaccctttctacttggccctggaagatggcggatcagcgcatggcgtattcctcctgaattccaacgcaatggacgttgttcttcagccatctcctgctttgagttggagatctacaggcgggatactggacgtctacatctttctgggtccagagcctaaatccgtagtgcagcagtatcttgatgtcgtcggatacccgtttatgccaccatattggggcctggggttccacttgtgccgctggggatattcatccaccgccattacacgacaagttgttgagaatatgaccagggcacattttcctctggatgtacagtggaacgacctggactacatggatagtcgccgcgacttcaccttcaataaggatgggttcagagactttcctgctatggtccaagaacttcaccagggaggcaggaggtacatgatgatcgtagatccgggaatttcttcttctggcccagccggttcatacagaccgtatgacgaaggactgcgacgaggcgtctttatcacgaacgagactggtcagcctttgataggcaaggtttggccagggtccaccgctttcccggatttcacaaatcctgaggcactggcctggtgggaagatatggtcgccgagtttcacgaccaggtcccatttgacgggatgtggatcgacatgaacgagccatccaacttcattagaggaagtgtggatggctgtccgaataatgagctggaaaaccctccttacgtaccaggcgttgttggtgggactcttcaagctgcgacgatttgcgcatcctcccatcagttcctgtcaacccactataacttgcacaatctgtacgggacaacagaggctatcgccagtcatagggccctggtaaaagctagaggaacacgccctttcgttatctctcgctcaacttttgcaggccacggtaggtatgccggacattggaccggcgacgtctggagttcttgggaacagctggcttcctccgttccagagatattgcagtttaacctgttgggagtcccacttgtaggtgcagatgtttgtggcttcctggggaacacctcagaagaattgtgcgtaagatggactcaactgggcgccttctacccttttatgcgcaatcacaactcactgacatctttgcctcaagaaccgtactcatttagtgagccagcacagcaggccatgaggaaggctcttggcctgagatatgcacttctgccgcatctgtacacccttttccaccaggctcatgtccatggagagactgttgcacgacctctgttcttggagttcccaaaagactcttccacgtggacagtcgatcaccagatgctgtggggcgaggctctgctgattacacctgtattgcaacctggtaaggccgaagttaccgggtactttccattggggacctggtatgatctgcaaacagtcccggttgaagctcttggaagtcttccacctccacctgctgcaccaagggagcctgcgatccactctgaaggacagtgggtaactttgcctgcaccgctggacaccatcaatgtccatctgcgcgaaggctacatcataccacttcaaggtcctggactgaccactacagagtctagaaaacaaccaatggctcttgctgttgcactgactaaaagcggcgaagcaaggggtgagctgttctgggacgacggagagtcactggaggtactcgaacgaggcgcgtatacgcaggtcatttttgaggctcgcaataatacgatcgttaacgagctggtccacgtcacttcagaaggtgcaggccttcagttgggcaaggtaactgtcctgggagttgctacagcaccgcagcaggtcttgtccaacggacggcccgtaagcaactttacctatagtcctgataccaaagttctggacatctgcgttgctctgctgatgggtgagcagttcctggtatcatggtgc

SEQ ID NO: 566 - protein, 944 aa, synthetic construct
  REGION 1..944: note = Variant of the Homo Sapiens Lysosomal alpha-glucosidase
MEWSWVFLFFLSVTTGVHSGHILWHDFSTVPRELSGSSQVLEETHPAHQVGASRPGPRDAQLHPGRPRAVPTQCDVPTNSRFDCAPEKAITQEQCEARGCCYIPAKQGLQGAQMGQPWCFFPPSYPSYKLENLSQSEMGYTATLTRTTPSFFPKDILTLRLDVMMETENRLHFTIKDPANRRYEVPLETPHVHSRAPSPLYSVEFSEEPFGVIVRRQLDGRVLLNTTVAPLFFADQFLQLSTSLPSQYITGLAEHLSPLMLSTSWNKITLWNRDLAPTPGANLYGSHPFYLALEDGGSAHGVFLLNSNAMDVVLQPSPALSWRSTGGILDVYIFLGPEPKSVVQQYLDVVGYPFMPPYWGLGFHLCRWGYSSTAITRQVVENMTRAHFPLDVQWNDLDYMDSRRDFTFNKDGFRDFPAMVQELHQGGRRYMMIVDPGISSSGPAGSYRPYDEGLRRGVFITNETGQPLIGKVWPGSTAFPDFTNPEALAWWEDMVAEFHDQVPFDGMWIDMNEPSNFIRGSVDGCPNNELENPPYVPGVVGGTLQAATICASSHQFLSTHYNLHNLYGTTEAIASHRALVKARGTRPFVISRSTFAGHGRYAGHWTGDVWSSWEQLASSVPEILQFNLLGVPLVGADVCGFLGNTSEELCVRWTQLGAFYPFMRNHNSLTSLPQEPYSFSEPAQQAMRKALGLRYALLPHLYTLFHQAHVHGETVARPLFLEFPKDSSTWTVDHQMLWGEALLITPVLQPGKAEVTGYFPLGTWYDLQTVPVEALGSLPPPPAAPREPAIHSEGQWVTLPAPLDTINVHLREGYIIPLQGPGLTTTESRKQPMALAVALTKSGEARGELFWDDGESLEVLERGAYTQVIFEARNNTIVNELVHVTSEGAGLQLGKVTVLGVATAPQQVLSNGRPVSNFTYSPDTKVLDICVALLMGEQFLVSWC

SEQ ID NO: 567 - DNA, 2832 bp, synthetic construct
  misc_feature 1..2832: note = Variant of the Homo Sapiens Lysosomal alpha-glucosidase
  source 1..2832: mol_type = other DNA
atggaatggagctgggtctttctcttcttcctgtcagtaacgactggtgtccactccggacacattctgtggcatgatttttctaccgtgcctagagagctttccggttcaagtcaagtcctcgaagaaacacatccagcccatcaggttggcgcatctaggccgggccctcgggacgctcaactccacccagggagacctagggccgttcccactcagtgcgacgtgccagagaactcacgcttcgattgtgcacctgagaaggctatcacgcaagagcagtgcgaggcccgcggatgttgttacataccggctaaacaggggctgcagggtgcgcagatgggccaaccttggtgcttcttcccaccatcctatccgagttacaagctggagaatctctcccagtctgaaatgggatataccgcaacactgactcggaccaccccctccttctttcccaaagatatcttgactctgagacttgacgtaatgatggagacagaaaacaggctccactttaccattaaggaccctgccaatcgccgatacgaggtgcctctggaaacaccacacgtgcacagtagagctccatcacctctgtattctgtcgagttctccgaagagccgtttggcgttatcgtcaggaggcagctcgacgggcgagtgcttctgaacacgactgtggccccgttgttctttgcggatcagtttctgcaactgtcaacaagtctcccttctcagtacattaccgggcttgcagagcatctgtccccactcatgctgagtacttcatggaacaaaatcacactgtggaatagagaccttgctcctactccaggagccaacttgtatggttctcaccctttctacttggccctggaagatggcggatcagcgcatggcgtattcctcctgaattccaacgcaatggacgttgttcttcagccatctcctgctttgagttggagatctacaggcgggatactggacgtctacatctttctgggtccagagcctaaatccgtagtgcagcagtatcttgatgtcgtcggatacccgtttatgccaccatattggggcctggggttccacttgtgccgctggggatattcatccaccgccattacacgacaagttgttgagaatatgaccagggcacattttcctctggatgtacagtggaacgacctggactacatggatagtcgccgcgacttcaccttcaataaggatgggttcagagactttcctgctatggtccaagaacttcaccagggaggcaggaggtacatgatgatcgtagatccgggaatttcttcttctggcccagccggttcatacagaccgtatgacgaaggactgcgacgaggcgtctttatcacgaacgagactggtcagcctttgataggcaaggtttggccagggtccaccgctttcccggatttcacaaatcctgaggcactggcctggtgggaagatatggtcgccgagtttcacgaccaggtcccatttgacgggatgtggatcgacatgaacgagccatccaacttcattagaggaagtgtggatggctgtccgaataatgagctggaaaaccctccttacgtaccaggcgttgttggtgggactcttcaagctgcgacgatttgcgcatcctcccatcagttcctgtcaacccactataacttgcacaatctgtacgggacaacagaggctatcgccagtcatagggccctggtaaaagctagaggaacacgccctttcgttatctctcgctcaacttttgcaggccacggtaggtatgccggacattggaccggcgacgtctggagttcttgggaacagctggcttcctccgttccagagatattgcagtttaacctgttgggagtcccacttgtaggtgcagatgtttgtggcttcctggggaacacctcagaagaattgtgcgtaagatggactcaactgggcgccttctacccttttatgcgcaatcacaactcactgacatctttgcctcaagaaccgtactcatttagtgagccagcacagcaggccatgaggaaggctcttggcctgagatatgcacttctgccgcatctgtacacccttttccaccaggctcatgtccatggagagactgttgcacgacctctgttcttggagttcccaaaagactcttccacgtggacagtcgatcaccagatgctgtggggcgaggctctgctgattacacctgtattgcaacctggtaaggccgaagttaccgggtactttccattggggacctggtatgatctgcaaacagtcccggttgaagctcttggaagtcttccacctccacctgctgcaccaagggagcctgcgatccactctgaaggacagtgggtaactttgcctgcaccgctggacaccatcaatgtccatctgcgcgctggctacatcataccacttcaaggtcctggactgaccactacagagtctagaaaacaaccaatggctcttgctgttgcactgactaaaagcggcgaagcaaggggtgagctgttctgggacgacggagagtcactggaggtactcgaacgaggcgcgtatacgcaggtcatttttgaggctcgcaataatacgatcgttaacgagctggtccacgtcacttcagaaggtgcaggccttcagttgggcaaggtaactgtcctgggagttgctacagcaccgcagcaggtcttgtccaacggacggcccgtaagcaactttacctatagtcctgataccaaagttctggacatctgcgttgctctgctgatgggtgagcagttcctggtatcatggtgc

SEQ ID NO: 568 - protein, 944 aa, synthetic construct
  REGION 1..944: note = Variant of the Homo Sapiens Lysosomal alpha-glucosidase
MEWSWVFLFFLSVTTGVHSGHILWHDFSTVPRELSGSSQVLEETHPAHQVGASRPGPRDAQLHPGRPRAVPTQCDVPENSRFDCAPEKAITQEQCEARGCCYIPAKQGLQGAQMGQPWCFFPPSYPSYKLENLSQSEMGYTATLTRTTPSFFPKDILTLRLDVMMETENRLHFTIKDPANRRYEVPLETPHVHSRAPSPLYSVEFSEEPFGVIVRRQLDGRVLLNTTVAPLFFADQFLQLSTSLPSQYITGLAEHLSPLMLSTSWNKITLWNRDLAPTPGANLYGSHPFYLALEDGGSAHGVFLLNSNAMDVVLQPSPALSWRSTGGILDVYIFLGPEPKSVVQQYLDVVGYPFMPPYWGLGFHLCRWGYSSTAITRQVVENMTRAHFPLDVQWNDLDYMDSRRDFTFNKDGFRDFPAMVQELHQGGRRYMMIVDPGISSSGPAGSYRPYDEGLRRGVFITNETGQPLIGKVWPGSTAFPDFTNPEALAWWEDMVAEFHDQVPFDGMWIDMNEPSNFIRGSVDGCPNNELENPPYVPGVVGGTLQAATICASSHQFLSTHYNLHNLYGTTEAIASHRALVKARGTRPFVISRSTFAGHGRYAGHWTGDVWSSWEQLASSVPEILQFNLLGVPLVGADVCGFLGNTSEELCVRWTQLGAFYPFMRNHNSLTSLPQEPYSFSEPAQQAMRKALGLRYALLPHLYTLFHQAHVHGETVARPLFLEFPKDSSTWTVDHQMLWGEALLITPVLQPGKAEVTGYFPLGTWYDLQTVPVEALGSLPPPPAAPREPAIHSEGQWVTLPAPLDTINVHLRAGYIIPLQGPGLTTTESRKQPMALAVALTKSGEARGELFWDDGESLEVLERGAYTQVIFEARNNTIVNELVHVTSEGAGLQLGKVTVLGVATAPQQVLSNGRPVSNFTYSPDTKVLDICVALLMGEQFLVSWC

SEQ ID NO: 569 - DNA, 2832 bp, synthetic construct
  misc_feature 1..2832: note = Variant of the Homo Sapiens Lysosomal alpha-glucosidase
  source 1..2832: mol_type = other DNA
atggaatggagctgggtctttctcttcttcctgtcagtaacgactggtgtccactccggacacattctgtggcatgatttttctaccgtgcctagagagctttccggttcaagtcaagtcctcgaagaaacacatccagcccatcaggttggcgcatctaggccgggccctcgggacgctcaactccacccagggagacctagggccgttcccactcagtgcgacgtgccagagaactcacgcttcgattgtgcacctgagaaggctatcacgcaagagcagtgcgaggcccgcggatgttgttacataccggctaaacaggggctgcagggtgcgcagatgggccaaccttggtgcttcttcccaccatcctatccgagttacaagctggagaatctctcccagtctgaaatgggatataccgcaacactgactcggaccaccccctccttctttcccaaagatatcttgactctgagacttgacgtaatgatggagacagaaaacaggctccactttaccattaaggaccctgccaatcgccgatacgaggtgcctctggaaacaccacacgtgcacagtagagctccatcacctctgtattctgtcgagttctccgaagagccgtttggcgttatcgtcaggaggcagctcgacgggcgagtgcttctgaacacgactgtggccccgttgttctttgcggatcagtttctgcaactgtcaacaagtctcccttctcagtacattaccgggcttgcagagcatctgtccccactcatgctgagtacttcatggaaccacatcacactgtggaatagagaccttgctcctactccaggagccaacttgtatggttctcaccctttctacttggccctggaagatggcggatcagcgcatggcgtattcctcctgaattccaacgcaatggacgttgttcttcagccatctcctgctttgagttggagatctacaggcgggatactggacgtctacatctttctgggtccagagcctaaatccgtagtgcagcagtatcttgatgtcgtcggatacccgtttatgccaccatattggggcctggggttccacttgtgccgctggggatattcatccaccgccattacacgacaagttgttgagaatatgaccagggcacattttcctctggatgtacagtggaacgacctggactacatggatagtcgccgcgacttcaccttcaataaggatgggttcagagactttcctgctatggtccaagaacttcaccagggaggcaggaggtacatgatgatcgtagatccgggaatttcttcttctggcccagccggttcatacagaccgtatgacgaaggactgcgacgaggcgtctttatcacgaacgagactggtcagcctttgataggcaaggtttggccagggtccaccgctttcccggatttcacaaatcctgaggcactggcctggtgggaagatatggtcgccgagtttcacgaccaggtcccatttgacgggatgtggatcgacatgaacgagccatccaacttcattagaggaagtgtggatggctgtccgaataatgagctggaaaaccctccttacgtaccaggcgttgttggtgggactcttcaagctgcgacgatttgcgcatcctcccatcagttcctgtcaacccactataacttgcacaatctgtacgggacaacagaggctatcgccagtcatagggccctggtaaaagctagaggaacacgccctttcgttatctctcgctcaacttttgcaggccacggtaggtatgccggacattggaccggcgacgtctggagttcttgggaacagctggcttcctccgttccagagatattgcagtttaacctgttgggagtcccacttgtaggtgcagatgtttgtggcttcctggggaacacctcagaagaattgtgcgtaagatggactcaactgggcgccttctacccttttatgcgcaatcacaactcactgacatctttgcctcaagaaccgtactcatttagtgagccagcacagcaggccatgaggaaggctcttggcctgagatatgcacttctgccgcatctgtacacccttttccaccaggctcatgtccatggagagactgttgcacgacctctgttcttggagttcccaaaagactcttccacgtggacagtcgatcaccagatgctgtggggcgaggctctgctgattacacctgtattgcaacctggtaaggccgaagttaccgggtactttccattggggacctggtatgatctgcaaacagtcccggttgaagctcttggaagtcttccacctccacctgctgcaccaagggagcctgcgatccactctgaaggacagtgggtaactttgcctgcaccgctggacaccatcaatgtccatctgcgcgaaggctacatcataccacttcaaggtcctggactgaccactacagagtctagaaaacaaccaatggctcttgctgttgcactgactaaaagcggcgaagcaaggggtgagctgttctgggacgacggagagtcactggaggtactcgaacgaggcgcgtatacgcaggtcatttttgaggctcgcaataatacgatcgttaacgagctggtccacgtcacttcagaaggtgcaggccttcagttgggcaaggtaactgtcctgggagttgctacagcaccgcagcaggtcttgtccaacggacggcccgtaagcaactttacctatagtcctgataccaaagttctggacatctgcgttgctctgctgatgggtgagcagttcctggtatcatggtgc

SEQ ID NO: 570 - protein, 944 aa, synthetic construct
  REGION 1..944: note = Variant of the Homo Sapiens Lysosomal alpha-glucosidase
MEWSWVFLFFLSVTTGVHSGHILWHDFSTVPRELSGSSQVLEETHPAHQVGASRPGPRDAQLHPGRPRAVPTQCDVPENSRFDCAPEKAITQEQCEARGCCYIPAKQGLQGAQMGQPWCFFPPSYPSYKLENLSQSEMGYTATLTRTTPSFFPKDILTLRLDVMMETENRLHFTIKDPANRRYEVPLETPHVHSRAPSPLYSVEFSEEPFGVIVRRQLDGRVLLNTTVAPLFFADQFLQLSTSLPSQYITGLAEHLSPLMLSTSWNHITLWNRDLAPTPGANLYGSHPFYLALEDGGSAHGVFLLNSNAMDVVLQPSPALSWRSTGGILDVYIFLGPEPKSVVQQYLDVVGYPFMPPYWGLGFHLCRWGYSSTAITRQVVENMTRAHFPLDVQWNDLDYMDSRRDFTFNKDGFRDFPAMVQELHQGGRRYMMIVDPGISSSGPAGSYRPYDEGLRRGVFITNETGQPLIGKVWPGSTAFPDFTNPEALAWWEDMVAEFHDQVPFDGMWIDMNEPSNFIRGSVDGCPNNELENPPYVPGVVGGTLQAATICASSHQFLSTHYNLHNLYGTTEAIASHRALVKARGTRPFVISRSTFAGHGRYAGHWTGDVWSSWEQLASSVPEILQFNLLGVPLVGADVCGFLGNTSEELCVRWTQLGAFYPFMRNHNSLTSLPQEPYSFSEPAQQAMRKALGLRYALLPHLYTLFHQAHVHGETVARPLFLEFPKDSSTWTVDHQMLWGEALLITPVLQPGKAEVTGYFPLGTWYDLQTVPVEALGSLPPPPAAPREPAIHSEGQWVTLPAPLDTINVHLREGYIIPLQGPGLTTTESRKQPMALAVALTKSGEARGELFWDDGESLEVLERGAYTQVIFEARNNTIVNELVHVTSEGAGLQLGKVTVLGVATAPQQVLSNGRPVSNFTYSPDTKVLDICVALLMGEQFLVSWC

SEQ ID NO: 571 - DNA, 2832 bp, synthetic construct
  misc_feature 1..2832: note = Variant of the Homo Sapiens Lysosomal alpha-glucosidase
  source 1..2832: mol_type = other DNA
atggaatggagctgggtctttctcttcttcctgtcagtaacgactggtgtccactccggacacattctgtggcatgatttttctatcgtgcctagagagctttccggttcaagtcaagtcctcgaagaaacacatccagcccatcaggttggcgcatctaggccgggccctcgggacgctcaactccacccagggagacctagggccgttcccactcagtgcgacgtgccagagaactcacgcttcgattgtgcacctgagaaggctatcacgcaagagcagtgcgaggcccgcggatgttgttacataccggctaaacaggggctgcagggtgcgcagatgggccaaccttggtgcttcttcccaccatcctatccgagttacaagctggagaatctctcccagtctgaaatgggatataccgcaacactgactcggaccaccccctccttctttcccaaagatatcttgactctgagacttgacgtaatgatggagacagaaaacaggctccactttaccattaaggaccctgccaatcgccgatacgaggtgcctctggaaacaccacacgtgcacagtagagctccatcacctctgtattctgtcgagttctccgaagagccgtttggcgttatcgtcaggaggcagctcgacgggcgagtgcttctgaacacgactgtggccccgttgttctttgcggatcagtttctgcaactgtcaacaagtctcccttctcagtacattaccgggcttgcagagcatctgtccccactcatgctgagtacttcatggaacaaaatcacactgtggaatagagaccttgctcctactccaggagccaacttgtatggttctcaccctttctacttggccctggaagatggcggatcagcgcatggcgtattcctcctgaattccaacgcaatggacgttgttcttcagccatctcctgctttgagttggagatctacaggcgggatactggacgtctacatctttctgggtccagagcctaaatccgtagtgcagcagtatcttgatgtcgtcggatacccgtttatgccaccatattggggcctggggttccacttgtgccgctggggatattcatccaccgccattacacgacaagttgttgagaatatgaccagggcacattttcctctggatgtacagtggaacgacctggactacatggatagtcgccgcgacttcaccttcaataaggatgggttcagagactttcctgctatggtccaagaacttcaccagggaggcaggaggtacatgatgatcgtagatccgggaatttcttcttctggcccagccggttcatacagaccgtatgacgaaggactgcgacgaggcgtctttatcacgaacgagactggtcagcctttgataggcaaggtttggccagggtccaccgctttcccggatttcacaaatcctgaggcactggcctggtgggaagatatggtcgccgagtttcacgaccaggtcccatttgacgggatgtggatcgacatgaacgagccatccaacttcattagaggaagtgtggatggctgtccgaataatgagctggaaaaccctccttacgtaccaggcgttgttggtgggactcttcaagctgcgacgatttgcgcatcctcccatcagttcctgtcaacccactataacttgcacaatctgtacgggacaacagaggctatcgccagtcatagggccctggtaaaagctagaggaacacgccctttcgttatctctcgctcaacttttgcaggccacggtaggtatgccggacattggaccggcgacgtctggagttcttgggaacagctggcttcctccgttccagagatattgcagtttaacctgttgggagtcccacttgtaggtgcagatgtttgtggcttcctggggaacacctcagaagaattgtgcgtaagatggactcaactgggcgccttctacccttttatgcgcaatcacaactcactgacatctttgcctcaagaaccgtactcatttagtgagccagcacagcaggccatgaggaaggctcttggcctgagatatgcacttctgccgcatctgtacacccttttccaccaggctcatgtccatggagagactgttgcacgacctctgttcttggagttcccaaaagactcttccacgtggacagtcgatcaccagatgctgtggggcgaggctctgctgattacacctgtattgcaacctggtaaggccgaagttaccgggtactttccattggggacctggtatgatctgcaaacagtcccggttgaagctcttggaagtcttccacctccacctgctgcaccaagggagcctgcgatccactctgaaggacagtgggtaactttgcctgcaccgctggacaccatcaatgtccatctgcgcgaaggctacatcataccacttcaaggtcctggactgaccactacagagtctagaaaacaaccaatggctcttgctgttgcactgactaaaagcggcgaagcaaggggtgagctgttctgggacgacggagagtcactggaggtactcgaacgaggcgcgtatacgcaggtcatttttgaggctcgcaataatacgatcgttaacgagctggtccacgtcacttcagaaggtgcaggccttcagttgggcaaggtaactgtcctgggagttgctacagcaccgcagcaggtcttgtccaacggacggcccgtaagcaactttacctatagtcctgataccaaagttctggacatctgcgttgctctgctgatgggtgagcagttcctggtatcatggtgc

SEQ ID NO: 572 - protein, 944 aa, synthetic construct
  REGION 1..944: note = Variant of the Homo Sapiens Lysosomal alpha-glucosidase
MEWSWVFLFFLSVTTGVHSGHILWHDFSIVPRELSGSSQVLEETHPAHQVGASRPGPRDAQLHPGRPRAVPTQCDVPENSRFDCAPEKAITQEQCEARGCCYIPAKQGLQGAQMGQPWCFFPPSYPSYKLENLSQSEMGYTATLTRTTPSFFPKDILTLRLDVMMETENRLHFTIKDPANRRYEVPLETPHVHSRAPSPLYSVEFSEEPFGVIVRRQLDGRVLLNTTVAPLFFADQFLQLSTSLPSQYITGLAEHLSPLMLSTSWNKITLWNRDLAPTPGANLYGSHPFYLALEDGGSAHGVFLLNSNAMDVVLQPSPALSWRSTGGILDVYIFLGPEPKSVVQQYLDVVGYPFMPPYWGLGFHLCRWGYSSTAITRQVVENMTRAHFPLDVQWNDLDYMDSRRDFTFNKDGFRDFPAMVQELHQGGRRYMMIVDPGISSSGPAGSYRPYDEGLRRGVFITNETGQPLIGKVWPGSTAFPDFTNPEALAWWEDMVAEFHDQVPFDGMWIDMNEPSNFIRGSVDGCPNNELENPPYVPGVVGGTLQAATICASSHQFLSTHYNLHNLYGTTEAIASHRALVKARGTRPFVISRSTFAGHGRYAGHWTGDVWSSWEQLASSVPEILQFNLLGVPLVGADVCGFLGNTSEELCVRWTQLGAFYPFMRNHNSLTSLPQEPYSFSEPAQQAMRKALGLRYALLPHLYTLFHQAHVHGETVARPLFLEFPKDSSTWTVDHQMLWGEALLITPVLQPGKAEVTGYFPLGTWYDLQTVPVEALGSLPPPPAAPREPAIHSEGQWVTLPAPLDTINVHLREGYIIPLQGPGLTTTESRKQPMALAVALTKSGEARGELFWDDGESLEVLERGAYTQVIFEARNNTIVNELVHVTSEGAGLQLGKVTVLGVATAPQQVLSNGRPVSNFTYSPDTKVLDICVALLMGEQFLVSWC

SEQ ID NO: 573 - DNA, 2832 bp, synthetic construct
  misc_feature 1..2832: note = Variant of the Homo Sapiens Lysosomal alpha-glucosidase
  source 1..2832: mol_type = other DNA
atggaatggagctgggtctttctcttcttcctgtcagtaacgactggtgtccactccggacacattctgcaccatgatttttctaccgtgcctagagagctttccggttcaagtcaagtcctcgaagaaacacatccagcccatcaggttggcgcatctaggccgggccctcgggacgctcaactccacccagggagacctagggccgttcccactcagtgcgacgtgccagagaactcacgcttcgattgtgcacctgagaaggctatcacgcaagagcagtgcgaggcccgcggatgttgttacataccggctaaacaggggctgcagggtgcgcagatgggccaaccttggtgcttcttcccaccatcctatccgagttacaagctggagaatctctcccagtctgaaatgggatataccgcaacactgactcggaccaccccctccttctttcccaaagatatcttgactctgagacttgacgtaatgatggagacagaaaacaggctccactttaccattaaggaccctgccaatcgccgatacgaggtgcctctggaaacaccacacgtgcacagtagagctccatcacctctgtattctgtcgagttctccgaagagccgtttggcgttatcgtcaggaggcagctcgacgggcgagtgcttctgaacacgactgtggccccgttgttctttgcggatcagtttctgcaactgtcaacaagtctcccttctcagtacattaccgggcttgcagagcatctgtccccactcatgctgagtacttcatggaacaaaatcacactgtggaatagagaccttgctcctactccaggagccaacttgtatggttctcaccctttctacttggccctggaagatggcggatcagcgcatggcgtattcctcctgaattccaacgcaatggacgttgttcttcagccatctcctgctttgagttggagatctacaggcgggatactggacgtctacatctttctgggtccagagcctaaatccgtagtgcagcagtatcttgatgtcgtcggatacccgtttatgccaccatattggggcctggggttccacttgtgccgctggggatattcatccaccgccattacacgacaagttgttgagaatatgaccagggcacattttcctctggatgtacagtggaacgacctggactacatggatagtcgccgcgacttcaccttcaataaggatgggttcagagactttcctgctatggtccaagaacttcaccagggaggcaggaggtacatgatgatcgtagatccgggaatttcttcttctggcccagccggttcatacagaccgtatgacgaaggactgcgacgaggcgtctttatcacgaacgagactggtcagcctttgataggcaaggtttggccagggtccaccgctttcccggatttcacaaatcctgaggcactggcctggtgggaagatatggtcgccgagtttcacgaccaggtcccatttgacgggatgtggatcgacatgaacgagccatccaacttcattagaggaagtgtggatggctgtccgaataatgagctggaaaaccctccttacgtaccaggcgttgttggtgggactcttcaagctgcgacgatttgcgcatcctcccatcagttcctgtcaacccactataacttgcacaatctgtacgggacaacagaggctatcgccagtcatagggccctggtaaaagctagaggaacacgccctttcgttatctctcgctcaacttttgcaggccacggtaggtatgccggacattggaccggcgacgtctggagttcttgggaacagctggcttcctccgttccagagatattgcagtttaacctgttgggagtcccacttgtaggtgcagatgtttgtggcttcctggggaacacctcagaagaattgtgcgtaagatggactcaactgggcgccttctacccttttatgcgcaatcacaactcactgacatctttgcctcaagaaccgtactcatttagtgagccagcacagcaggccatgaggaaggctcttggcctgagatatgcacttctgccgcatctgtacacccttttccaccaggctcatgtccatggagagactgttgcacgacctctgttcttggagttcccaaaagactcttccacgtggacagtcgatcaccagatgctgtggggcgaggctctgctgattacacctgtattgcaacctggtaaggccgaagttaccgggtactttccattggggacctggtatgatctgcaaacagtcccggttgaagctcttggaagtcttccacctccacctgctgcaccaagggagcctgcgatccactctgaaggacagtgggtaactttgcctgcaccgctggacaccatcaatgtccatctgcgcgaaggctacatcataccacttcaaggtcctggactgaccactacagagtctagaaaacaaccaatggctcttgctgttgcactgactaaaagcggcgaagcaaggggtgagctgttctgggacgacggagagtcactggaggtactcgaacgaggcgcgtatacgcaggtcatttttgaggctcgcaataatacgatcgttaacgagctggtccacgtcacttcagaaggtgcaggccttcagttgggcaaggtaactgtcctgggagttgctacagcaccgcagcaggtcttgtccaacggacggcccgtaagcaactttacctatagtcctgataccaaagttctggacatctgcgttgctctgctgatgggtgagcagttcctggtatcatggtgc

SEQ ID NO: 574 - protein, 944 aa, synthetic construct
  REGION 1..944: note = Variant of the Homo Sapiens Lysosomal alpha-glucosidase
MEWSWVFLFFLSVTTGVHSGHILHHDFSTVPRELSGSSQVLEETHPAHQVGASRPGPRDAQLHPGRPRAVPTQCDVPENSRFDCAPEKAITQEQCEARGCCYIPAKQGLQGAQMGQPWCFFPPSYPSYKLENLSQSEMGYTATLTRTTPSFFPKDILTLRLDVMMETENRLHFTIKDPANRRYEVPLETPHVHSRAPSPLYSVEFSEEPFGVIVRRQLDGRVLLNTTVAPLFFADQFLQLSTSLPSQYITGLAEHLSPLMLSTSWNKITLWNRDLAPTPGANLYGSHPFYLALEDGGSAHGVFLLNSNAMDVVLQPSPALSWRSTGGILDVYIFLGPEPKSVVQQYLDVVGYPFMPPYWGLGFHLCRWGYSSTAITRQVVENMTRAHFPLDVQWNDLDYMDSRRDFTFNKDGFRDFPAMVQELHQGGRRYMMIVDPGISSSGPAGSYRPYDEGLRRGVFITNETGQPLIGKVWPGSTAFPDFTNPEALAWWEDMVAEFHDQVPFDGMWIDMNEPSNFIRGSVDGCPNNELENPPYVPGVVGGTLQAATICASSHQFLSTHYNLHNLYGTTEAIASHRALVKARGTRPFVISRSTFAGHGRYAGHWTGDVWSSWEQLASSVPEILQFNLLGVPLVGADVCGFLGNTSEELCVRWTQLGAFYPFMRNHNSLTSLPQEPYSFSEPAQQAMRKALGLRYALLPHLYTLFHQAHVHGETVARPLFLEFPKDSSTWTVDHQMLWGEALLITPVLQPGKAEVTGYFPLGTWYDLQTVPVEALGSLPPPPAAPREPAIHSEGQWVTLPAPLDTINVHLREGYIIPLQGPGLTTTESRKQPMALAVALTKSGEARGELFWDDGESLEVLERGAYTQVIFEARNNTIVNELVHVTSEGAGLQLGKVTVLGVATAPQQVLSNGRPVSNFTYSPDTKVLDICVALLMGEQFLVSWC

SEQ ID NO: 575 - DNA, 2832 bp, synthetic construct
  misc_feature 1..2832: note = Variant of the Homo Sapiens Lysosomal alpha-glucosidase
  source 1..2832: mol_type = other DNA
atggaatggagctgggtctttctcttcttcctgtcagtaacgactggtgtccactccggacacattctgtggcatgatttttctaccgtgcctagagagctttccggttcaagtcaagtcctcgaagaaacacatccagcccatcaggttggcgcatctaggccgggccctcgggacgctcaactccacccagggagacctagggccgttcccactcagtgcgacgtgccagagaactcacgcttcgattgtgcacctgagaaggctatcacgcaagagcagtgcgaggcccgcggatgttgttacataccggctaaacaggggctgcagggtgcgcagatgggccaaccttggtgcttcttcccaccatcctatccgagttacaagctggagaatctctccatctctgaaatgggatataccgcaacactgactcggaccaccccctccttctttcccaaagatatcttgactctgagacttgacgtaatgatggagacagaaaacaggctccactttaccattaaggaccctgccaatcgccgatacgaggtgcctctggaaacaccacacgtgcacagtagagctccatcacctctgtattctgtcgagttctccgaagagccgtttggcgttatcgtcaggaggcagctcgacgggcgagtgcttctgaacacgactgtggccccgttgttctttgcggatcagtttctgcaactgtcaacaagtctcccttctcagtacattaccgggcttgcagagcatctgtccccactcatgctgagtacttcatggaacaaaatcacactgtggaatagagaccttgctcctactccaggagccaacttgtatggttctcaccctttctacttggccctggaagatggcggatcagcgcatggcgtattcctcctgaattccaacgcaatggacgttgttcttcagccatctcctgctttgagttggagatctacaggcgggatactggacgtctacatctttctgggtccagagcctaaatccgtagtgcagcagtatcttgatgtcgtcggatacccgtttatgccaccatattggggcctggggttccacttgtgccgctggggatattcatccaccgccattacacgacaagttgttgagaatatgaccagggcacattttcctctggatgtacagtggaacgacctggactacatggatagtcgccgcgacttcaccttcaataaggatgggttcagagactttcctgctatggtccaagaacttcaccagggaggcaggaggtacatgatgatcgtagatccgggaatttcttcttctggcccagccggttcatacagaccgtatgacgaaggactgcgacgaggcgtctttatcacgaacgagactggtcagcctttgataggcaaggtttggccagggtccaccgctttcccggatttcacaaatcctgaggcactggcctggtgggaagatatggtcgccgagtttcacgaccaggtcccatttgacgggatgtggatcgacatgaacgagccatccaacttcattagaggaagtgtggatggctgtccgaataatgagctggaaaaccctccttacgtaccaggcgttgttggtgggactcttcaagctgcgacgatttgcgcatcctcccatcagttcctgtcaacccactataacttgcacaatctgtacgggacaacagaggctatcgccagtcatagggccctggtaaaagctagaggaacacgccctttcgttatctctcgctcaacttttgcaggccacggtaggtatgccggacattggaccggcgacgtctggagttcttgggaacagctggcttcctccgttccagagatattgcagtttaacctgttgggagtcccacttgtaggtgcagatgtttgtggcttcctggggaacacctcagaagaattgtgcgtaagatggactcaactgggcgccttctacccttttatgcgcaatcacaactcactgacatctttgcctcaagaaccgtactcatttagtgagccagcacagcaggccatgaggaaggctcttggcctgagatatgcacttctgccgcatctgtacacccttttccaccaggctcatgtccatggagagactgttgcacgacctctgttcttggagttcccaaaagactcttccacgtggacagtcgatcaccagatgctgtggggcgaggctctgctgattacacctgtattgcaacctggtaaggccgaagttaccgggtactttccattggggacctggtatgatctgcaaacagtcccggttgaagctcttggaagtcttccacctccacctgctgcaccaagggagcctgcgatccactctgaaggacagtgggtaactttgcctgcaccgctggacaccatcaatgtccatctgcgcgaaggctacatcataccacttcaaggtcctggactgaccactacagagtctagaaaacaaccaatggctcttgctgttgcactgactaaaagcggcgaagcaaggggtgagctgttctgggacgacggagagtcactggaggtactcgaacgaggcgcgtatacgcaggtcatttttgaggctcgcaataatacgatcgttaacgagctggtccacgtcacttcagaaggtgcaggccttcagttgggcaaggtaactgtcctgggagttgctacagcaccgcagcaggtcttgtccaacggacggcccgtaagcaactttacctatagtcctgataccaaagttctggacatctgcgttgctctgctgatgggtgagcagttcctggtatcatggtgc

SEQ ID NO: 576 - protein, 944 aa, synthetic construct
  REGION 1..944: note = Variant of the Homo Sapiens Lysosomal alpha-glucosidase
MEWSWVFLFFLSVTTGVHSGHILWHDFSTVPRELSGSSQVLEETHPAHQVGASRPGPRDAQLHPGRPRAVPTQCDVPENSRFDCAPEKAITQEQCEARGCCYIPAKQGLQGAQMGQPWCFFPPSYPSYKLENLSISEMGYTATLTRTTPSFFPKDILTLRLDVMMETENRLHFTIKDPANRRYEVPLETPHVHSRAPSPLYSVEFSEEPFGVIVRRQLDGRVLLNTTVAPLFFADQFLQLSTSLPSQYITGLAEHLSPLMLSTSWNKITLWNRDLAPTPGANLYGSHPFYLALEDGGSAHGVFLLNSNAMDVVLQPSPALSWRSTGGILDVYIFLGPEPKSVVQQYLDVVGYPFMPPYWGLGFHLCRWGYSSTAITRQVVENMTRAHFPLDVQWNDLDYMDSRRDFTFNKDGFRDFPAMVQELHQGGRRYMMIVDPGISSSGPAGSYRPYDEGLRRGVFITNETGQPLIGKVWPGSTAFPDFTNPEALAWWEDMVAEFHDQVPFDGMWIDMNEPSNFIRGSVDGCPNNELENPPYVPGVVGGTLQAATICASSHQFLSTHYNLHNLYGTTEAIASHRALVKARGTRPFVISRSTFAGHGRYAGHWTGDVWSSWEQLASSVPEILQFNLLGVPLVGADVCGFLGNTSEELCVRWTQLGAFYPFMRNHNSLTSLPQEPYSFSEPAQQAMRKALGLRYALLPHLYTLFHQAHVHGETVARPLFLEFPKDSSTWTVDHQMLWGEALLITPVLQPGKAEVTGYFPLGTWYDLQTVPVEALGSLPPPPAAPREPAIHSEGQWVTLPAPLDTINVHLREGYIIPLQGPGLTTTESRKQPMALAVALTKSGEARGELFWDDGESLEVLERGAYTQVIFEARNNTIVNELVHVTSEGAGLQLGKVTVLGVATAPQQVLSNGRPVSNFTYSPDTKVLDICVALLMGEQFLVSWC

SEQ ID NO: 577 - DNA, 2832 bp, synthetic construct
  misc_feature 1..2832: note = Variant of the Homo Sapiens Lysosomal alpha-glucosidase
  source 1..2832: mol_type = other DNA
atggaatggagctgggtctttctcttcttcctgtcagtaacgactggtgtccactccggacacattctgtggcatgatttttctaccgtgcctagagagctttccggttcaagtcaagtcctcgaagaaacacatccagcccatcaggttggcgcatctaggccgggccctcgggacgctcaactccacccagggagacctagggccgttcccactcagtgcgacgtgccagagaactcacgcttcgattgtgcacctgagaaggctatcacgcaagagcagtgcgaggcccgcggatgttgttacataccggctaaacaggggctgcagggtgcgcagatgggccaaccttggtgcttcttcccaccatcctatccgagttacaagctggagaatctctcccagtctgaaatgggatataccgcaacactgactcggaccaccccctccttctttcccaaagatatcttgactctgagacttgacgtaatgatggagacagaaaacaggctccactttaccattaaggaccctgccaatcgccgatacgaggtgcctctggaaacaccacacgtgcacagtagagctccatcacctctgtattctgtcgagttctccgaagagccgtttggcgttatcgtcaggaggcagctcgacgggcgagtgcttctgaacacgactgtggccccgttgttctttgcggatcagtttctgcaactgtcaacaagtctcccttctcagtacattaccgggcttgcagagcatctgtccccactcatgctgagtacttcatggaacaaaatcacactgtggaatagagaccttgctcctactccaggagccaacttgtatggttctcaccctttctacttggccctggaagatggcggatcagcgcatggcgtattcctcctgaattccaacgcaatggacgttgttcttcagccatctcctgctttgagttggagatctacaggcgggatactggacgtctacatctttctgggtccagagcctaaatccgtagtgcagcagtatcttgatgtcgtcggatacccgtttatgccaccatattggggcctggggttccacttgtgccgctggggatattcatccaccgccattacacgacaagttgttgagaatatgaccagggcacattttcctctggatgtacagtggaacgacctggactacatggatagtcgccgcgacttcaccttcaataaggatgggttcagagactttcctgctatggtccaagaacttcaccagggaggcaggaggtacatgatgatcgtagatccgggaatttcttcttctggcccagccggttcatacagaccgtatgacgaaggactgcgacgaggcgtctttatcacgaacgagactggtcagcctttgataggcaaggtttggccagggtccaccgctttcccggatttcacaaatcctgaggcactggcctggtgggaagatatggtcgccgagtttcacgaccaggtcccatttgacgggatgtggatcgacatgaacgagccatccaacttcattagaggaagtgtggatggctgtccgaataatgagctggaaaaccctccttacgtaccaggcgttgttggtgggactcttcaagctgcgacgatttgcgcatcctcccatcagttcctgtcaacccactataacttgcacaatctgtacgggacaacagaggctatcgccagtcatagggccctggtaaaagctagaggaacacgccctttcgttatctctcgctcaacttttgcaggccacggtaggtatgccggacattggaccggcgacgtctggagttcttgggaacagctggcttcctccgttccagagatattgcagtttaacctgttgggagtcccacttgtaggtgcagatgtttgtggcttcctggggaacacctcagaagaattgtgcgtaagatggactcaactgggcgccttctacccttttatgcgcaatcacaactcactgacatctttgcctcaagaaccgtactcatttagtgagccagcacagcaggccatgaggaaggctcttcatctgagatatgcacttctgccgcatctgtacacccttttccaccaggctcatgtccatggagagactgttgcacgacctctgttcttggagttcccaaaagactcttccacgtggacagtcgatcaccagatgctgtggggcgaggctctgctgattacacctgtattgcaacctggtaaggccgaagttaccgggtactttccattggggacctggtatgatctgcaaacagtcccggttgaagctcttggaagtcttccacctccacctgctgcaccaagggagcctgcgatccactctgaaggacagtgggtaactttgcctgcaccgctggacaccatcaatgtccatctgcgcgaaggctacatcataccacttcaaggtcctggactgaccactacagagtctagaaaacaaccaatggctcttgctgttgcactgactaaaagcggcgaagcaaggggtgagctgttctgggacgacggagagtcactggaggtactcgaacgaggcgcgtatacgcaggtcatttttgaggctcgcaataatacgatcgttaacgagctggtccacgtcacttcagaaggtgcaggccttcagttgggcaaggtaactgtcctgggagttgctacagcaccgcagcaggtcttgtccaacggacggcccgtaagcaactttacctatagtcctgataccaaagttctggacatctgcgttgctctgctgatgggtgagcagttcctggtatcatggtgc

SEQ ID NO: 578 - protein, 944 aa, synthetic construct
  REGION 1..944: note = Variant of the Homo Sapiens Lysosomal alpha-glucosidase
MEWSWVFLFFLSVTTGVHSGHILWHDFSTVPRELSGSSQVLEETHPAHQVGASRPGPRDAQLHPGRPRAVPTQCDVPENSRFDCAPEKAITQEQCEARGCCYIPAKQGLQGAQMGQPWCFFPPSYPSYKLENLSQSEMGYTATLTRTTPSFFPKDILTLRLDVMMETENRLHFTIKDPANRRYEVPLETPHVHSRAPSPLYSVEFSEEPFGVIVRRQLDGRVLLNTTVAPLFFADQFLQLSTSLPSQYITGLAEHLSPLMLSTSWNKITLWNRDLAPTPGANLYGSHPFYLALEDGGSAHGVFLLNSNAMDVVLQPSPALSWRSTGGILDVYIFLGPEPKSVVQQYLDVVGYPFMPPYWGLGFHLCRWGYSSTAITRQVVENMTRAHFPLDVQWNDLDYMDSRRDFTFNKDGFRDFPAMVQELHQGGRRYMMIVDPGISSSGPAGSYRPYDEGLRRGVFITNETGQPLIGKVWPGSTAFPDFTNPEALAWWEDMVAEFHDQVPFDGMWIDMNEPSNFIRGSVDGCPNNELENPPYVPGVVGGTLQAATICASSHQFLSTHYNLHNLYGTTEAIASHRALVKARGTRPFVISRSTFAGHGRYAGHWTGDVWSSWEQLASSVPEILQFNLLGVPLVGADVCGFLGNTSEELCVRWTQLGAFYPFMRNHNSLTSLPQEPYSFSEPAQQAMRKALHLRYALLPHLYTLFHQAHVHGETVARPLFLEFPKDSSTWTVDHQMLWGEALLITPVLQPGKAEVTGYFPLGTWYDLQTVPVEALGSLPPPPAAPREPAIHSEGQWVTLPAPLDTINVHLREGYIIPLQGPGLTTTESRKQPMALAVALTKSGEARGELFWDDGESLEVLERGAYTQVIFEARNNTIVNELVHVTSEGAGLQLGKVTVLGVATAPQQVLSNGRPVSNFTYSPDTKVLDICVALLMGEQFLVSWC

SEQ ID NO: 579 - DNA, 2832 bp, synthetic construct
  misc_feature 1..2832: note = Variant of the Homo Sapiens Lysosomal alpha-glucosidase
  source 1..2832: mol_type = other DNA
atggaatggagctgggtctttctcttcttcctgtcagtaacgactggtgtccactccggacacattctgtggcatgattttcacaccgtgcctagagagctttccggttcaagtcaagtcctcgaagaaacacatccagcccatcaggttggcgcatctaggccgggccctcgggacgctcaactccacccagggagacctagggccgttcccactcagtgcgacgtgccagagaactcacgcttcgattgtgcacctgagaaggctatcacgcaagagcagtgcgaggcccgcggatgttgttacataccggctaaacaggggctgcagggtgcgcagatgggccaaccttggtgcttcttcccaccatcctatccgagttacaagctggagaatctctcccagtctgaaatgggatataccgcaacactgactcggaccaccccctccttctttcccaaagatatcttgactctgagacttgacgtaatgatggagacagaaaacaggctccactttaccattaaggaccctgccaatcgccgatacgaggtgcctctggaaacaccacacgtgcacagtagagctccatcacctctgtattctgtcgagttctccgaagagccgtttggcgttatcgtcaggaggcagctcgacgggcgagtgcttctgaacacgactgtggccccgttgttctttgcggatcagtttctgcaactgtcaacaagtctcccttctcagtacattaccgggcttgcagagcatctgtccccactcatgctgagtacttcatggaacaaaatcacactgtggaatagagaccttgctcctactccaggagccaacttgtatggttctcaccctttctacttggccctggaagatggcggatcagcgcatggcgtattcctcctgaattccaacgcaatggacgttgttcttcagccatctcctgctttgagttggagatctacaggcgggatactggacgtctacatctttctgggtccagagcctaaatccgtagtgcagcagtatcttgatgtcgtcggatacccgtttatgccaccatattggggcctggggttccacttgtgccgctggggatattcatccaccgccattacacgacaagttgttgagaatatgaccagggcacattttcctctggatgtacagtggaacgacctggactacatggatagtcgccgcgacttcaccttcaataaggatgggttcagagactttcctgctatggtccaagaacttcaccagggaggcaggaggtacatgatgatcgtagatccgggaatttcttcttctggcccagccggttcatacagaccgtatgacgaaggactgcgacgaggcgtctttatcacgaacgagactggtcagcctttgataggcaaggtttggccagggtccaccgctttcccggatttcacaaatcctgaggcactggcctggtgggaagatatggtcgccgagtttcacgaccaggtcccatttgacgggatgtggatcgacatgaacgagccatccaacttcattagaggaagtgtggatggctgtccgaataatgagctggaaaaccctccttacgtaccaggcgttgttggtgggactcttcaagctgcgacgatttgcgcatcctcccatcagttcctgtcaacccactataacttgcacaatctgtacgggacaacagaggctatcgccagtcatagggccctggtaaaagctagaggaacacgccctttcgttatctctcgctcaacttttgcaggccacggtaggtatgccggacattggaccggcgacgtctggagttcttgggaacagctggcttcctccgttccagagatattgcagtttaacctgttgggagtcccacttgtaggtgcagatgtttgtggcttcctggggaacacctcagaagaattgtgcgtaagatggactcaactgggcgccttctacccttttatgcgcaatcacaactcactgacatctttgcctcaagaaccgtactcatttagtgagccagcacagcaggccatgaggaaggctcttggcctgagatatgcacttctgccgcatctgtacacccttttccaccaggctcatgtccatggagagactgttgcacgacctctgttcttggagttcccaaaagactcttccacgtggacagtcgatcaccagatgctgtggggcgaggctctgctgattacacctgtattgcaacctggtaaggccgaagttaccgggtactttccattggggacctggtatgatctgcaaacagtcccggttgaagctcttggaagtcttccacctccacctgctgcaccaagggagcctgcgatccactctgaaggacagtgggtaactttgcctgcaccgctggacaccatcaatgtccatctgcgcgaaggctacatcataccacttcaaggtcctggactgaccactacagagtctagaaaacaaccaatggctcttgctgttgcactgactaaaagcggcgaagcaaggggtgagctgttctgggacgacggagagtcactggaggtactcgaacgaggcgcgtatacgcaggtcatttttgaggctcgcaataatacgatcgttaacgagctggtccacgtcacttcagaaggtgcaggccttcagttgggcaaggtaactgtcctgggagttgctacagcaccgcagcaggtcttgtccaacggacggcccgtaagcaactttacctatagtcctgataccaaagttctggacatctgcgttgctctgctgatgggtgagcagttcctggtatcatggtgc

SEQ ID NO: 580 - protein, 944 aa, synthetic construct
  REGION 1..944: note = Variant of the Homo Sapiens Lysosomal alpha-glucosidase
MEWSWVFLFFLSVTTGVHSGHILWHDFHTVPRELSGSSQVLEETHPAHQVGASRPGPRDAQLHPGRPRAVPTQCDVPENSRFDCAPEKAITQEQCEARGCCYIPAKQGLQGAQMGQPWCFFPPSYPSYKLENLSQSEMGYTATLTRTTPSFFPKDILTLRLDVMMETENRLHFTIKDPANRRYEVPLETPHVHSRAPSPLYSVEFSEEPFGVIVRRQLDGRVLLNTTVAPLFFADQFLQLSTSLPSQYITGLAEHLSPLMLSTSWNKITLWNRDLAPTPGANLYGSHPFYLALEDGGSAHGVFLLNSNAMDVVLQPSPALSWRSTGGILDVYIFLGPEPKSVVQQYLDVVGYPFMPPYWGLGFHLCRWGYSSTAITRQVVENMTRAHFPLDVQWNDLDYMDSRRDFTFNKDGFRDFPAMVQELHQGGRRYMMIVDPGISSSGPAGSYRPYDEGLRRGVFITNETGQPLIGKVWPGSTAFPDFTNPEALAWWEDMVAEFHDQVPFDGMWIDMNEPSNFIRGSVDGCPNNELENPPYVPGVVGGTLQAATICASSHQFLSTHYNLHNLYGTTEAIASHRALVKARGTRPFVISRSTFAGHGRYAGHWTGDVWSSWEQLASSVPEILQFNLLGVPLVGADVCGFLGNTSEELCVRWTQLGAFYPFMRNHNSLTSLPQEPYSFSEPAQQAMRKALGLRYALLPHLYTLFHQAHVHGETVARPLFLEFPKDSSTWTVDHQMLWGEALLITPVLQPGKAEVTGYFPLGTWYDLQTVPVEALGSLPPPPAAPREPAIHSEGQWVTLPAPLDTINVHLREGYIIPLQGPGLTTTESRKQPMALAVALTKSGEARGELFWDDGESLEVLERGAYTQVIFEARNNTIVNELVHVTSEGAGLQLGKVTVLGVATAPQQVLSNGRPVSNFTYSPDTKVLDICVALLMGEQFLVSWC

SEQ ID NO: 581 - DNA, 2832 bp, synthetic construct
  misc_feature 1..2832: note = Variant of the Homo Sapiens Lysosomal alpha-glucosidase
  source 1..2832: mol_type = other DNA
atggaatggagctgggtctttctcttcttcctgtcagtaacgactggtgtccactccggacacattctgtggcatgatttttctaccgtgcctagagagctttccggttcaagtcaagtcctcgaagaaacacatccagcccatcaggttggcgcatctaggccgggccctcgggacgctcaactccacccagggagacctagggccgttcccactcagtgcgacgtgccagagaactcacgcttcgattgtgcacctgagaaggctatcacgcaagagcagtgcgaggcccgcggatgttgttacataccggctaaacaggggctgcagggtgcgcagatgggccaaccttggtgcttcttcccaccatcctatccgagttacaagctggagaatctctcccagtctgaaatgggatataccgcaacactgactcggaccaccccctccttctttcccaaagatatcttgactctgagacttgacgtaatgatggagacagaaaacaggctccactttaccattaaggaccctgccaatcgccgatacgaggtgcctctggaaacaccacacgtgcacagtagagctccatcacctctgtattctgtcgagttctccgaagagccgtttggcgttatcgtcaggaggcagctcgacgggcgagtgcttctgaacacgactgtggccccgttgttctttgcggatcagtttctgcaactgtcaacaagtctcccttctcagtacattaccgggcttgcagagcatctgtccccactcatgctgagtacttcatggaacaaaatcacactgtggaatagagaccttgctcctactccaggagccaacttgtatggttctcaccctttctacttggccctggaagatggcggatcagcgcatggcgtattcctcctgaattccaacgcaatggacgttgttcttcagccatctcctgctttgagttggagatctacaggcgggatactggacgtctacatctttctgggtccagagcctaaatccgtagtgcagcagtatcttgatgtcgtcggatacccgtttatgccaccatattggggcctggggttccacttgtgccgctggggatattcatccaccgccattacacgacaagttgttgagaatatgaccagggcacattttcctctggatgtacagtggaacgacctggactacatggatagtcgccgcgacttcaccttcaataaggatgggttcagagactttcctgctatggtccaagaacttcaccagggaggcaggaggtacatgatgatcgtagatccgggaatttcttcttctggcccagccggttcatacagaccgtatgacgaaggactgcgacgaggcgtctttatcacgaacgagactggtcagcctttgataggcaaggtttggccagggtccaccgctttcccggatttcacaaatcctgaggcactggcctggtgggaagatatggtcgccgagtttcacgaccaggtcccatttgacgggatgtggatcgacatgaacgagccatccaacttcattagaggaagtgtggatggctgtccgaataatgagctggaaaaccctccttacgtaccaggcgttgttggtgggactcttcaagctgcgacgatttgcgcatcctcccatcagttcctgtcaacccactataacttgcacaatctgtacgggacaacagaggctatcgccagtcatagggccctggtaaaagctagaggaacacgccctttcgttatctctcgctcaacttttgcaggccacggtaggtatgccggacattggaccggcgacgtctggagttcttgggaacagctggcttcctccgttccagagatattgcagtttaacctgttgggagtcccacttgtaggtgcagatgtttgtggcttcctggggaacacctcagaagaattgtgcgtaagatggactcaactgggcgccttctacccttttatgcgcaatcacaactcactgacatctttgcctcaagaaccgtactcatttagtgagccagcacagcaggccatgaggaaggctcttggcctgagatatgcacttctgccgcatctgtacacccttttccaccaggctcatgtccatggagagactgttgcacgacctctgttcttggagttcccaaaagactcttccacgtggacagtcgatcaccagatgctgtggggcgaggctctgctgattacacctgtattgcaacctggtaaggccgaagttaccgggtactttccattggggacctggtatgatctgcaaacagtcccggttgaagctcttggaagtcttccacctccacctgctgcaccaagggagcctgcgatccactctgaaggacagtgggtaactttgcctgcaccgctggacaccatcaatgtccatctgcgcgaaggctacatcataccacttcaaggtcctggactgaccactacagagtctagaaaacaaccaatggctcttgctgttgcactgactaaaagcggcgaagcaaggggtgagctgttctgggacgacggagagtcactggaggtactcgaacgaggcgcgtatacgcaggtcatttttgaggctcgcaataatacgatcgttaacgagctggtccacgtcacttcagaaggtgcaggccttcagttgggcaaggtaactgtcctgggagttgctacagcaccgcagcaggtcttgtccaacggaaatcccgtaagcaactttacctatagtcctgataccaaagttctggacatctgcgttgctctgctgatgggtgagcagttcctggtatcatggtgc

SEQ ID NO: 582 - protein, 944 aa, synthetic construct
  REGION 1..944: note = Variant of the Homo Sapiens Lysosomal alpha-glucosidase
MEWSWVFLFFLSVTTGVHSGHILWHDFSTVPRELSGSSQVLEETHPAHQVGASRPGPRDAQLHPGRPRAVPTQCDVPENSRFDCAPEKAITQEQCEARGCCYIPAKQGLQGAQMGQPWCFFPPSYPSYKLENLSQSEMGYTATLTRTTPSFFPKDILTLRLDVMMETENRLHFTIKDPANRRYEVPLETPHVHSRAPSPLYSVEFSEEPFGVIVRRQLDGRVLLNTTVAPLFFADQFLQLSTSLPSQYITGLAEHLSPLMLSTSWNKITLWNRDLAPTPGANLYGSHPFYLALEDGGSAHGVFLLNSNAMDVVLQPSPALSWRSTGGILDVYIFLGPEPKSVVQQYLDVVGYPFMPPYWGLGFHLCRWGYSSTAITRQVVENMTRAHFPLDVQWNDLDYMDSRRDFTFNKDGFRDFPAMVQELHQGGRRYMMIVDPGISSSGPAGSYRPYDEGLRRGVFITNETGQPLIGKVWPGSTAFPDFTNPEALAWWEDMVAEFHDQVPFDGMWIDMNEPSNFIRGSVDGCPNNELENPPYVPGVVGGTLQAATICASSHQFLSTHYNLHNLYGTTEAIASHRALVKARGTRPFVISRSTFAGHGRYAGHWTGDVWSSWEQLASSVPEILQFNLLGVPLVGADVCGFLGNTSEELCVRWTQLGAFYPFMRNHNSLTSLPQEPYSFSEPAQQAMRKALGLRYALLPHLYTLFHQAHVHGETVARPLFLEFPKDSSTWTVDHQMLWGEALLITPVLQPGKAEVTGYFPLGTWYDLQTVPVEALGSLPPPPAAPREPAIHSEGQWVTLPAPLDTINVHLREGYIIPLQGPGLTTTESRKQPMALAVALTKSGEARGELFWDDGESLEVLERGAYTQVIFEARNNTIVNELVHVTSEGAGLQLGKVTVLGVATAPQQVLSNGNPVSNFTYSPDTKVLDICVALLMGEQFLVSWC

SEQ ID NO: 583 - DNA, 2832 bp, synthetic construct
  misc_feature 1..2832: note = Variant of the Homo Sapiens Lysosomal alpha-glucosidase
  source 1..2832: mol_type = other DNA
atggaatggagctgggtctttctcttcttcctgtcagtaacgactggtgtccactccggacacattctgtggcatgatttttctaccgtgcctagagagctttccggttcaagtcaagtcctcgaagaaacacatccagcccatcaggttggcgcatctaggccgggccctcgggacgctcaactccacccagggagacctagggccgttcccactcagtgcgacgtgccagagaactcacgcttcgattgtgcacctgagaaggctatcacgcaagagcagtgcgaggcccgcggatgttgttacataccggctaaacaggggctgcagggtgcgcagatgggccaaccttggtgcttcttcccaccatcctatccgagttacaagctggagaatctctcccagtctgaaatgggatataccgcaacactgactcggaccaccccctccttctttcccaaagatatcttgactctgagacttgacgtaatgatggagacagaaaacaggctccactttaccattaaggaccctgccaatcgccgatacgaggtgcctctggaaacaccacacgtgcacagtagagctccatcacctctgtattctgtcgagttctccgaagagccgtttggcgttatcgtcaggaggcagctcgacgggcgagtgcttctgaacacgactgtggccccgttgttctttgcggatcagtttctgcaactgtcaacaagtctcccttctcagtacattaccgggcttgcagagcatctgtccccactcatgctgagtacttcatggaacaaaatcacactgtggaatagagaccttgctcctactccaggagccaacttgtatggttctcaccctttctacttggccctggaagatggcggatcagcgcatggcgtattcctcctgaattccaacgcaatggacgttgttcttcagccatctcctgctttgagttggagatctacaggcgggatactggacgtctacatctttctgggtccagagcctaaatccgtagtgcagcagtatcttgatgtcgtcggatacccgtttatgccaccatattggggcctggggttccacttgtgccgctggggatattcatccaccgccattacacgacaagttgttgagaatatgaccagggcacattttcctctggatgtacagtggaacgacctggactacatggatagtcgccgcgacttcaccttcaataaggatgggttcagagactttcctgctatggtccaagaacttcaccagggaggcaggaggtacatgatgatcgtagatccgggaatttcttcttctggcccagccggttcatacagaccgtatgacgaaggactgcgacgaggcgtctttatcacgaacgagactggtcagcctttgataggcaaggtttggccagggtccaccgctttcccggatttcacaaatcctgaggcactggcctggtgggaagatatggtcgccgagtttcacgaccaggtcccatttgacgggatgtggatcgacatgaacgagccatccaacttcattagaggaagtgtggatggctgtccgaataatgagctggaaaaccctccttacgtaccaggcgttgttggtgggactcttcaagctgcgacgatttgcgcatcctcccatcagttcctgtcaacccactataacttgcacaatctgtacgggacaacagaggctatcgccagtcatagggccctggtaaaagctagaggaacacgccctttcgttatctctcgctcaacttttgcaggccacggtaggtatgccggacattggaccggcgacgtctggagttcttgggaacagctggcttcctccgttccagagatattgcagtttaacctgttgggagtcccacttgtaggtgcagatgtttgtggcttcctggggaacacctcagaagaattgtgcgtaagatggactcaactgggcgccttctacccttttatgcgcaatcacaactcactgacatctttgcctcaagaaccgtactcatttagtgagccagcacagcaggccatgaggaaggctcttggcctgagatatgcacttctgccgcatctgtacacccttttccaccaggctcatgtccatggagagactgttgcacgacctctgttcttggagttcccaaaagactcttccacgtggacagtcgatcaccagatgctgtggggcgaggctctgctgattacacctgtattgcaacctggtaaggccgaagttaccgggtactttccattggggacctggtatgatctgcaaacagtcccggttgaagctcttggaagtcttccacctccacctgctgcaccaagggagcctgcgatccactctgaaggacagtgggtaactttgcctgcaccgctggacaccatcaatgtccatctgcgcgaaggctacatcataccacttcaaggtcctggactgaccactacagagtctagaaaacaaccaatggctcttgctgttgcactgactaaagatggcgaagcaaggggtgagctgttctgggacgacggagagtcactggaggtactcgaacgaggcgcgtatacgcaggtcatttttgaggctcgcaataatacgatcgttaacgagctggtccacgtcacttcagaaggtgcaggccttcagttgggcaaggtaactgtcctgggagttgctacagcaccgcagcaggtcttgtccaacggacggcccgtaagcaactttacctatagtcctgataccaaagttctggacatctgcgttgctctgctgatgggtgagcagttcctggtatcatggtgc

SEQ ID NO: 584 - protein, 944 aa, synthetic construct
  REGION 1..944: note = Variant of the Homo Sapiens Lysosomal alpha-glucosidase
MEWSWVFLFFLSVTTGVHSGHILWHDFSTVPRELSGSSQVLEETHPAHQVGASRPGPRDAQLHPGRPRAVPTQCDVPENSRFDCAPEKAITQEQCEARGCCYIPAKQGLQGAQMGQPWCFFPPSYPSYKLENLSQSEMGYTATLTRTTPSFFPKDILTLRLDVMMETENRLHFTIKDPANRRYEVPLETPHVHSRAPSPLYSVEFSEEPFGVIVRRQLDGRVLLNTTVAPLFFADQFLQLSTSLPSQYITGLAEHLSPLMLSTSWNKITLWNRDLAPTPGANLYGSHPFYLALEDGGSAHGVFLLNSNAMDVVLQPSPALSWRSTGGILDVYIFLGPEPKSVVQQYLDVVGYPFMPPYWGLGFHLCRWGYSSTAITRQVVENMTRAHFPLDVQWNDLDYMDSRRDFTFNKDGFRDFPAMVQELHQGGRRYMMIVDPGISSSGPAGSYRPYDEGLRRGVFITNETGQPLIGKVWPGSTAFPDFTNPEALAWWEDMVAEFHDQVPFDGMWIDMNEPSNFIRGSVDGCPNNELENPPYVPGVVGGTLQAATICASSHQFLSTHYNLHNLYGTTEAIASHRALVKARGTRPFVISRSTFAGHGRYAGHWTGDVWSSWEQLASSVPEILQFNLLGVPLVGADVCGFLGNTSEELCVRWTQLGAFYPFMRNHNSLTSLPQEPYSFSEPAQQAMRKALGLRYALLPHLYTLFHQAHVHGETVARPLFLEFPKDSSTWTVDHQMLWGEALLITPVLQPGKAEVTGYFPLGTWYDLQTVPVEALGSLPPPPAAPREPAIHSEGQWVTLPAPLDTINVHLREGYIIPLQGPGLTTTESRKQPMALAVALTKDGEARGELFWDDGESLEVLERGAYTQVIFEARNNTIVNELVHVTSEGAGLQLGKVTVLGVATAPQQVLSNGRPVSNFTYSPDTKVLDICVALLMGEQFLVSWC

SEQ ID NO: 585 - DNA, 2832 bp, synthetic construct
  misc_feature 1..2832: note = Variant of the Homo Sapiens Lysosomal alpha-glucosidase
  source 1..2832: mol_type = other DNA
atggaatggagctgggtctttctcttcttcctgtcagtaacgactggtgtccactccggacacattctgtggcatgatttttctaccgtgcctagagagctttccggttcaagtcaagtcctcgaagaaacacatccagcccatcaggttggcgcatctaggccgggccctcgggacgctcaactccacccagggagacctagggccgttcccactcagtgcgacgtgccagagaactcacgcttcgattgtgcacctgagaaggctatcacgcaagagcagtgcgaggcccgcggatgttgttacataccggctaaacaggggctgcagggtgcgcagatgggccaaccttggtgcttcttcccaccatcctatccgagttacaagctggagaatctctcccagtctgaaatgggatataccgcaacactgactcggaccaccccctccttctttcccaaagatatcttgactctgagacttgacgtaatgatggagacagaaaacaggctccactttaccattaaggaccctgccaatcgccgatacgaggtgcctctggaaacaccacacgtgcacagtagagctccatcacctctgtattctgtcgagttctccgaagagccgtttggcgttatcgtcaggaggcagctcgacgggcgagtgcttctgaacacgactgtggccccgttgttctttgcggatcagtttctgcaactgtcaacaagtctcccttctcagtacattaccgggcttgcagagcatctgtccccactcatgctgagtacttcatggaacaaaatcacactgtggaatagagaccttgctcctactccaggagccaacttgtatggttctcaccctttctacttggccctggaagatggcggatcagcgcatggcgtattcctcctgaattccaacgcaatggacgttgttcttcagccatctcctgctttgagttggagatctacaggcgggatactggacgtctacatctttctgggtccagagcctaaatccgtagtgcagcagtatcttgatgtcgtcggatacccgtttatgccaccatattggggcctggggttccacttgtgccgctggggatattcatccaccgccattacacgacaagttgttgagaatatgaccagggcacattttcctctggatgtacagtggaacgacctggactacatggatagtcgccgcgacttcaccttcaataaggatgggttcagagactttcctgctatggtccaagaacttcaccagggaggcaggaggtacatgatgatcgtagatccgggaatttcttcttctggcccagccggttcatacagaccgtatgacgaaggactgcgacgaggcgtctttatcacgaacgagactggtcagcctttgataggcaaggtttggccagggtccaccgctttcccggatttcacaaatcctgaggcactggcctggtgggaagatatggtcgccgagtttcacgaccaggtcccatttgacgggatgtggatcgacatgaacgagccatccaacttcattagaggaagtaaagatggctgtccgaataatgagctggaaaaccctccttacgtaccaggcgttgttggtgggactcttcaagctgcgacgatttgcgcatcctcccatcagttcctgtcaacccactataacttgcacaatctgtacgggacaacagaggctatcgccagtcatagggccctggtaaaagctagaggaacacgccctttcgttatctctcgctcaacttttgcaggccacggtaggtatgccggacattggaccggcgacgtctggagttcttgggaacagctggcttcctccgttccagagatattgcagtttaacctgttgggagtcccacttgtaggtgcagatgtttgtggcttcctggggaacacctcagaagaattgtgcgtaagatggactcaactgggcgccttctacccttttatgcgcaatcacaactcactgacatctttgcctcaagaaccgtactcatttagtgagccagcacagcaggccatgaggaaggctcttggcctgagatatgcacttctgccgcatctgtacacccttttccaccaggctcatgtccatggagagactgttgcacgacctctgttcttggagttcccaaaagactcttccacgtggacagtcgatcaccagatgctgtggggcgaggctctgctgattacacctgtattgcaacctggtaaggccgaagttaccgggtactttccattggggacctggtatgatctgcaaacagtcccggttgaagctcttggaagtcttccacctccacctgctgcaccaagggagcctgcgatccactctgaaggacagtgggtaactttgcctgcaccgctggacaccatcaatgtccatctgcgcgaaggctacatcataccacttcaaggtcctggactgaccactacagagtctagaaaacaaccaatggctcttgctgttgcactgactaaaagcggcgaagcaaggggtgagctgttctgggacgacggagagtcactggaggtactcgaacgaggcgcgtatacgcaggtcatttttgaggctcgcaataatacgatcgttaacgagctggtccacgtcacttcagaaggtgcaggccttcagttgggcaaggtaactgtcctgggagttgctacagcaccgcagcaggtcttgtccaacggacggcccgtaagcaactttacctatagtcctgataccaaagttctggacatctgcgttgctctgctgatgggtgagcagttcctggtatcatggtgc

SEQ ID NO: 586 - protein, 944 aa, synthetic construct
  REGION 1..944: note = Variant of the Homo Sapiens Lysosomal alpha-glucosidase
MEWSWVFLFFLSVTTGVHSGHILWHDFSTVPRELSGSSQVLEETHPAHQVGASRPGPRDAQLHPGRPRAVPTQCDVPENSRFDCAPEKAITQEQCEARGCCYIPAKQGLQGAQMGQPWCFFPPSYPSYKLENLSQSEMGYTATLTRTTPSFFPKDILTLRLDVMMETENRLHFTIKDPANRRYEVPLETPHVHSRAPSPLYSVEFSEEPFGVIVRRQLDGRVLLNTTVAPLFFADQFLQLSTSLPSQYITGLAEHLSPLMLSTSWNKITLWNRDLAPTPGANLYGSHPFYLALEDGGSAHGVFLLNSNAMDVVLQPSPALSWRSTGGILDVYIFLGPEPKSVVQQYLDVVGYPFMPPYWGLGFHLCRWGYSSTAITRQVVENMTRAHFPLDVQWNDLDYMDSRRDFTFNKDGFRDFPAMVQELHQGGRRYMMIVDPGISSSGPAGSYRPYDEGLRRGVFITNETGQPLIGKVWPGSTAFPDFTNPEALAWWEDMVAEFHDQVPFDGMWIDMNEPSNFIRGSKDGCPNNELENPPYVPGVVGGTLQAATICASSHQFLSTHYNLHNLYGTTEAIASHRALVKARGTRPFVISRSTFAGHGRYAGHWTGDVWSSWEQLASSVPEILQFNLLGVPLVGADVCGFLGNTSEELCVRWTQLGAFYPFMRNHNSLTSLPQEPYSFSEPAQQAMRKALGLRYALLPHLYTLFHQAHVHGETVARPLFLEFPKDSSTWTVDHQMLWGEALLITPVLQPGKAEVTGYFPLGTWYDLQTVPVEALGSLPPPPAAPREPAIHSEGQWVTLPAPLDTINVHLREGYIIPLQGPGLTTTESRKQPMALAVALTKSGEARGELFWDDGESLEVLERGAYTQVIFEARNNTIVNELVHVTSEGAGLQLGKVTVLGVATAPQQVLSNGRPVSNFTYSPDTKVLDICVALLMGEQFLVSWC

SEQ ID NO: 587 - DNA, 2832 bp, synthetic construct
  misc_feature 1..2832: note = Variant of the Homo Sapiens Lysosomal alpha-glucosidase
  source 1..2832: mol_type = other DNA
atggaatggagctgggtctttctcttcttcctgtcagtaacgactggtgtccactccggacacattctgtggcatgatttttctaccgtgcctagagagctttccggttcaagtcaagtcctcgaagaaacacatccagcccatcaggttggcgcatctaggccgggccctcgggacgctcaactccacccagggagacctagggccgttcccactcagtgcgacgtgccagagaactcacgcttcgattgtgcacctgagaaggctatcacgcaagagcagtgcgaggcccgcggatgttgttacataccggctaaacaggggctgcagggtgcgcagatgggccaaccttggtgcttcttcccaccatcctatccgagttacaagctggagaatctctcccagtctgaaatgggatataccgcaacactgactcggaccaccccctccttctttcccaaagatatcttgactctgagacttgacgtaatgatggagacagaaaacaggctccactttaccattaaggaccctgccaatcgccgatacgaggtgcctctggaaacaccacacgtgcacagtagagctccatcacctctgtattctgtcgagttctccgaagagccgtttggcgttatcgtcaggaggcagctcgacgggcgagtgcttctgaacacgactgtggccccgttgttctttgcggatcagtttctgcaactgtcaacaagtctcccttctcagtacattaccgggcttgcagagcatctgtccccactcatgctgagtacttcatggaacaaaatcacactgtggaatagagaccttgctcctactccaggagccaacttgtatggttctcaccctttctacttggccctggaagatggcggatcagcgcatggcgtattcctcctgaattccaacgcaatggacgttgttcttcagccatctcctgctttgagttggagatctacaggcgggatactggacgtctacatctttctgggtccagagcctaaatccgtagtgcagcagtatcttgatgtcgtcggatacccgtttatgccaccatattggggcctggggttccacttgtgccgctggggatattcatccaccgccattacacgacaagttgttgagaatatgaccagggcacattttcctctggatgtacagtggaacgacctggactacatggatagtcgccgcgacttcaccttcaataaggatgggttcagagactttcctgctatggtccaagaacttcaccagggaggcaggaggtacatgatgatcgtagatccgggaatttcttcttctggcccagccggttcatacagaccgtatgacgaaggactgcgacgaggcgtctttatcacgaacgagactggtcagcctttgataggcaaggtttggccagggtccaccgctttcccggatttcacaaatcctgaggcactggcctggtgggaagatatggtcgccgagtttcacgaccaggtcccatttgacgggatgtggatcgacatgaacgagccatccaacttcattagaggaagtgtggatggctgtccgaataatgagctggaaaaccctccttacgtaccaggcgttgttggtgggactcttcaagctgcgacgatttgcgcatcctcccatcagttcctgtcaacccactataacttgcacaatctgtacgggacaacagaggctatcgccagtcatagggccctggtaaaagctagaggaacacgccctttcgttatctctcgctcaacttttgcaggccacggtaggtatgccggacattggaccggcgacgtctggagttcttgggaacagctggcttcctccgttccagagatattgcagtttaacctgttgggagtcccacttgtaggtgcagatgtttgtggcttcctggggaacacctcagaagaattgtgcgtaagatggactcaactgggcgccttctacccttttatgcgcaatcacaactcactgacatctttgcctcaagaaccgtactcatttagtgagccagcacagcaggccatgaggaaggctcttggcctgagatatgcacttctgccgcatctgtacacccttttccaccaggctcatgtccatggagagactgttgcacgacctctgttcttggagttcccaaaagactcttccacgtggacagtcgatcaccagatgctgtggggcgaggctctgctgattacacctgtattgcaacctggtaaggccgaagttaccgggtactttccattggggacctggtatgatctgcaaacagtcccggttgaagctcttggaagtcttccacctccacctgctgcaccaagggagcctgcgatccactctgaaggacagtgggtaactttgcctgcaccgctggacaccatcaatgtccatctgcgcgaaggctacatcataccacttcaaggtcctggactgaccactacagagtctagaaaacaaccaatggctcttgctgttgcactgactaaaagcggcgaagcaaggggtgagctgttctgggacgacggagagtcactggaggtactcgaacgaggcgcgtatacgcaggtcatttttgaggctcgcaataatacgatcgttaacgagctggtccacgtcacttcagaaggtgcaggccttcagttgcataaggtaactgtcctgggagttgctacagcaccgcagcaggtcttgtccaacggacggcccgtaagcaactttacctatagtcctgataccaaagttctggacatctgcgttgctctgctgatgggtgagcagttcctggtatcatggtgc

SEQ ID NO: 588 - protein, 944 aa, synthetic construct
  REGION 1..944: note = Variant of the Homo Sapiens Lysosomal alpha-glucosidase
MEWSWVFLFFLSVTTGVHSGHILWHDFSTVPRELSGSSQVLEETHPAHQVGASRPGPRDAQLHPGRPRAVPTQCDVPENSRFDCAPEKAITQEQCEARGCCYIPAKQGLQGAQMGQPWCFFPPSYPSYKLENLSQSEMGYTATLTRTTPSFFPKDILTLRLDVMMETENRLHFTIKDPANRRYEVPLETPHVHSRAPSPLYSVEFSEEPFGVIVRRQLDGRVLLNTTVAPLFFADQFLQLSTSLPSQYITGLAEHLSPLMLSTSWNKITLWNRDLAPTPGANLYGSHPFYLALEDGGSAHGVFLLNSNAMDVVLQPSPALSWRSTGGILDVYIFLGPEPKSVVQQYLDVVGYPFMPPYWGLGFHLCRWGYSSTAITRQVVENMTRAHFPLDVQWNDLDYMDSRRDFTFNKDGFRDFPAMVQELHQGGRRYMMIVDPGISSSGPAGSYRPYDEGLRRGVFITNETGQPLIGKVWPGSTAFPDFTNPEALAWWEDMVAEFHDQVPFDGMWIDMNEPSNFIRGSVDGCPNNELENPPYVPGVVGGTLQAATICASSHQFLSTHYNLHNLYGTTEAIASHRALVKARGTRPFVISRSTFAGHGRYAGHWTGDVWSSWEQLASSVPEILQFNLLGVPLVGADVCGFLGNTSEELCVRWTQLGAFYPFMRNHNSLTSLPQEPYSFSEPAQQAMRKALGLRYALLPHLYTLFHQAHVHGETVARPLFLEFPKDSSTWTVDHQMLWGEALLITPVLQPGKAEVTGYFPLGTWYDLQTVPVEALGSLPPPPAAPREPAIHSEGQWVTLPAPLDTINVHLREGYIIPLQGPGLTTTESRKQPMALAVALTKSGEARGELFWDDGESLEVLERGAYTQVIFEARNNTIVNELVHVTSEGAGLQLHKVTVLGVATAPQQVLSNGRPVSNFTYSPDTKVLDICVALLMGEQFLVSWC

SEQ ID NO: 589 - DNA, 2832 bp, synthetic construct
  misc_feature 1..2832: note = Variant of the Homo Sapiens Lysosomal alpha-glucosidase
  source 1..2832: mol_type = other DNA
atggaatggagctgggtctttctcttcttcctgtcagtaacgactggtgtccactccggacacattctgtggcatgatttttctaccgtgcctagagagctttccggttcaagtcaagtcctcgaagaaacacatccagcccatcaggttggcgcatctaggccgggccctcgggacgctcaactccacccagggagacctagggccgttcccactcagtgcgacgtgccaaagaactcacgcttcgattgtgcacctgagaaggctatcacgcaagagcagtgcgaggcccgcggatgttgttacataccggctaaacaggggctgcagggtgcgcagatgggccaaccttggtgcttcttcccaccatcctatccgagttacaagctggagaatctctcccagtctgaaatgggatataccgcaacactgactcggaccaccccctccttctttcccaaagatatcttgactctgagacttgacgtaatgatggagacagaaaacaggctccactttaccattaaggaccctgccaatcgccgatacgaggtgcctctggaaacaccacacgtgcacagtagagctccatcacctctgtattctgtcgagttctccgaagagccgtttggcgttatcgtcaggaggcagctcgacgggcgagtgcttctgaacacgactgtggccccgttgttctttgcggatcagtttctgcaactgtcaacaagtctcccttctcagtacattaccgggcttgcagagcatctgtccccactcatgctgagtacttcatggaacaaaatcacactgtggaatagagaccttgctcctactccaggagccaacttgtatggttctcaccctttctacttggccctggaagatggcggatcagcgcatggcgtattcctcctgaattccaacgcaatggacgttgttcttcagccatctcctgctttgagttggagatctacaggcgggatactggacgtctacatctttctgggtccagagcctaaatccgtagtgcagcagtatcttgatgtcgtcggatacccgtttatgccaccatattggggcctggggttccacttgtgccgctggggatattcatccaccgccattacacgacaagttgttgagaatatgaccagggcacattttcctctggatgtacagtggaacgacctggactacatggatagtcgccgcgacttcaccttcaataaggatgggttcagagactttcctgctatggtccaagaacttcaccagggaggcaggaggtacatgatgatcgtagatccgggaatttcttcttctggcccagccggttcatacagaccgtatgacgaaggactgcgacgaggcgtctttatcacgaacgagactggtcagcctttgataggcaaggtttggccagggtccaccgctttcccggatttcacaaatcctgaggcactggcctggtgggaagatatggtcgccgagtttcacgaccaggtcccatttgacgggatgtggatcgacatgaacgagccatccaacttcattagaggaagtgtggatggctgtccgaataatgagctggaaaaccctccttacgtaccaggcgttgttggtgggactcttcaagctgcgacgatttgcgcatcctcccatcagttcctgtcaacccactataacttgcacaatctgtacgggacaacagaggctatcgccagtcatagggccctggtaaaagctagaggaacacgccctttcgttatctctcgctcaacttttgcaggccacggtaggtatgccggacattggaccggcgacgtctggagttcttgggaacagctggcttcctccgttccagagatattgcagtttaacctgttgggagtcccacttgtaggtgcagatgtttgtggcttcctggggaacacctcagaagaattgtgcgtaagatggactcaactgggcgccttctacccttttatgcgcaatcacaactcactgacatctttgcctcaagaaccgtactcatttagtgagccagcacagcaggccatgaggaaggctcttggcctgagatatgcacttctgccgcatctgtacacccttttccaccaggctcatgtccatggagagactgttgcacgacctctgttcttggagttcccaaaagactcttccacgtggacagtcgatcaccagatgctgtggggcgaggctctgctgattacacctgtattgcaacctggtaaggccgaagttaccgggtactttccattggggacctggtatgatctgcaaacagtcccggttgaagctcttggaagtcttccacctccacctgctgcaccaagggagcctgcgatccactctgaaggacagtgggtaactttgcctgcaccgctggacaccatcaatgtccatctgcgcgaaggctacatcataccacttcaaggtcctggactgaccactacagagtctagaaaacaaccaatggctcttgctgttgcactgactaaaagcggcgaagcaaggggtgagctgttctgggacgacggagagtcactggaggtactcgaacgaggcgcgtatacgcaggtcatttttgaggctcgcaataatacgatcgttaacgagctggtccacgtcacttcagaaggtgcaggccttcagttgggcaaggtaactgtcctgggagttgctacagcaccgcagcaggtcttgtccaacggacggcccgtaagcaactttacctatagtcctgataccaaagttctggacatctgcgttgctctgctgatgggtgagcagttcctggtatcatggtgc

SEQ ID NO: 590 - protein, 944 aa, synthetic construct
  REGION 1..944: note = Variant of the Homo Sapiens Lysosomal alpha-glucosidase
MEWSWVFLFFLSVTTGVHSGHILWHDFSTVPRELSGSSQVLEETHPAHQVGASRPGPRDAQLHPGRPRAVPTQCDVPKNSRFDCAPEKAITQEQCEARGCCYIPAKQGLQGAQMGQPWCFFPPSYPSYKLENLSQSEMGYTATLTRTTPSFFPKDILTLRLDVMMETENRLHFTIKDPANRRYEVPLETPHVHSRAPSPLYSVEFSEEPFGVIVRRQLDGRVLLNTTVAPLFFADQFLQLSTSLPSQYITGLAEHLSPLMLSTSWNKITLWNRDLAPTPGANLYGSHPFYLALEDGGSAHGVFLLNSNAMDVVLQPSPALSWRSTGGILDVYIFLGPEPKSVVQQYLDVVGYPFMPPYWGLGFHLCRWGYSSTAITRQVVENMTRAHFPLDVQWNDLDYMDSRRDFTFNKDGFRDFPAMVQELHQGGRRYMMIVDPGISSSGPAGSYRPYDEGLRRGVFITNETGQPLIGKVWPGSTAFPDFTNPEALAWWEDMVAEFHDQVPFDGMWIDMNEPSNFIRGSVDGCPNNELENPPYVPGVVGGTLQAATICASSHQFLSTHYNLHNLYGTTEAIASHRALVKARGTRPFVISRSTFAGHGRYAGHWTGDVWSSWEQLASSVPEILQFNLLGVPLVGADVCGFLGNTSEELCVRWTQLGAFYPFMRNHNSLTSLPQEPYSFSEPAQQAMRKALGLRYALLPHLYTLFHQAHVHGETVARPLFLEFPKDSSTWTVDHQMLWGEALLITPVLQPGKAEVTGYFPLGTWYDLQTVPVEALGSLPPPPAAPREPAIHSEGQWVTLPAPLDTINVHLREGYIIPLQGPGLTTTESRKQPMALAVALTKSGEARGELFWDDGESLEVLERGAYTQVIFEARNNTIVNELVHVTSEGAGLQLGKVTVLGVATAPQQVLSNGRPVSNFTYSPDTKVLDICVALLMGEQFLVSWC

SEQ ID NO: 591 - DNA, 2832 bp, synthetic construct
  misc_feature 1..2832: note = Variant of the Homo Sapiens Lysosomal alpha-glucosidase
  source 1..2832: mol_type = other DNA
atggaatggagctgggtctttctcttcttcctgtcagtaacgactggtgtccactccggacacattctgtggcatgatttttctaccgtgcctagagagctttccggttcaagttttgtcctcgaagaaacacatccagcccatcaggttggcgcatctaggccgggccctcgggacgctcaactccacccagggagacctagggccgttcccactcagtgcgacgtgccagagaactcacgcttcgattgtgcacctgagaaggctatcacgcaagagcagtgcgaggcccgcggatgttgttacataccggctaaacaggggctgcagggtgcgcagatgggccaaccttggtgcttcttcccaccatcctatccgagttacaagctggagaatctctcccagtctgaaatgggatataccgcaacactgactcggaccaccccctccttctttcccaaagatatcttgactctgagacttgacgtaatgatggagacagaaaacaggctccactttaccattaaggaccctgccaatcgccgatacgaggtgcctctggaaacaccacacgtgcacagtagagctccatcacctctgtattctgtcgagttctccgaagagccgtttggcgttatcgtcaggaggcagctcgacgggcgagtgcttctgaacacgactgtggccccgttgttctttgcggatcagtttctgcaactgtcaacaagtctcccttctcagtacattaccgggcttgcagagcatctgtccccactcatgctgagtacttcatggaacaaaatcacactgtggaatagagaccttgctcctactccaggagccaacttgtatggttctcaccctttctacttggccctggaagatggcggatcagcgcatggcgtattcctcctgaattccaacgcaatggacgttgttcttcagccatctcctgctttgagttggagatctacaggcgggatactggacgtctacatctttctgggtccagagcctaaatccgtagtgcagcagtatcttgatgtcgtcggatacccgtttatgccaccatattggggcctggggttccacttgtgccgctggggatattcatccaccgccattacacgacaagttgttgagaatatgaccagggcacattttcctctggatgtacagtggaacgacctggactacatggatagtcgccgcgacttcaccttcaataaggatgggttcagagactttcctgctatggtccaagaacttcaccagggaggcaggaggtacatgatgatcgtagatccgggaatttcttcttctggcccagccggttcatacagaccgtatgacgaaggactgcgacgaggcgtctttatcacgaacgagactggtcagcctttgataggcaaggtttggccagggtccaccgctttcccggatttcacaaatcctgaggcactggcctggtgggaagatatggtcgccgagtttcacgaccaggtcccatttgacgggatgtggatcgacatgaacgagccatccaacttcattagaggaagtgtggatggctgtccgaataatgagctggaaaaccctccttacgtaccaggcgttgttggtgggactcttcaagctgcgacgatttgcgcatcctcccatcagttcctgtcaacccactataacttgcacaatctgtacgggacaacagaggctatcgccagtcatagggccctggtaaaagctagaggaacacgccctttcgttatctctcgctcaacttttgcaggccacggtaggtatgccggacattggaccggcgacgtctggagttcttgggaacagctggcttcctccgttccagagatattgcagtttaacctgttgggagtcccacttgtaggtgcagatgtttgtggcttcctggggaacacctcagaagaattgtgcgtaagatggactcaactgggcgccttctacccttttatgcgcaatcacaactcactgacatctttgcctcaagaaccgtactcatttagtgagccagcacagcaggccatgaggaaggctcttggcctgagatatgcacttctgccgcatctgtacacccttttccaccaggctcatgtccatggagagactgttgcacgacctctgttcttggagttcccaaaagactcttccacgtggacagtcgatcaccagatgctgtggggcgaggctctgctgattacacctgtattgcaacctggtaaggccgaagttaccgggtactttccattggggacctggtatgatctgcaaacagtcccggttgaagctcttggaagtcttccacctccacctgctgcaccaagggagcctgcgatccactctgaaggacagtgggtaactttgcctgcaccgctggacaccatcaatgtccatctgcgcgaaggctacatcataccacttcaaggtcctggactgaccactacagagtctagaaaacaaccaatggctcttgctgttgcactgactaaaagcggcgaagcaaggggtgagctgttctgggacgacggagagtcactggaggtactcgaacgaggcgcgtatacgcaggtcatttttgaggctcgcaataatacgatcgttaacgagctggtccacgtcacttcagaaggtgcaggccttcagttgggcaaggtaactgtcctgggagttgctacagcaccgcagcaggtcttgtccaacggacggcccgtaagcaactttacctatagtcctgataccaaagttctggacatctgcgttgctctgctgatgggtgagcagttcctggtatcatggtgc

SEQ ID NO: 592 - protein, 944 aa, synthetic construct
  REGION 1..944: note = Variant of the Homo Sapiens Lysosomal alpha-glucosidase
MEWSWVFLFFLSVTTGVHSGHILWHDFSTVPRELSGSSFVLEETHPAHQVGASRPGPRDAQLHPGRPRAVPTQCDVPENSRFDCAPEKAITQEQCEARGCCYIPAKQGLQGAQMGQPWCFFPPSYPSYKLENLSQSEMGYTATLTRTTPSFFPKDILTLRLDVMMETENRLHFTIKDPANRRYEVPLETPHVHSRAPSPLYSVEFSEEPFGVIVRRQLDGRVLLNTTVAPLFFADQFLQLSTSLPSQYITGLAEHLSPLMLSTSWNKITLWNRDLAPTPGANLYGSHPFYLALEDGGSAHGVFLLNSNAMDVVLQPSPALSWRSTGGILDVYIFLGPEPKSVVQQYLDVVGYPFMPPYWGLGFHLCRWGYSSTAITRQVVENMTRAHFPLDVQWNDLDYMDSRRDFTFNKDGFRDFPAMVQELHQGGRRYMMIVDPGISSSGPAGSYRPYDEGLRRGVFITNETGQPLIGKVWPGSTAFPDFTNPEALAWWEDMVAEFHDQVPFDGMWIDMNEPSNFIRGSVDGCPNNELENPPYVPGVVGGTLQAATICASSHQFLSTHYNLHNLYGTTEAIASHRALVKARGTRPFVISRSTFAGHGRYAGHWTGDVWSSWEQLASSVPEILQFNLLGVPLVGADVCGFLGNTSEELCVRWTQLGAFYPFMRNHNSLTSLPQEPYSFSEPAQQAMRKALGLRYALLPHLYTLFHQAHVHGETVARPLFLEFPKDSSTWTVDHQMLWGEALLITPVLQPGKAEVTGYFPLGTWYDLQTVPVEALGSLPPPPAAPREPAIHSEGQWVTLPAPLDTINVHLREGYIIPLQGPGLTTTESRKQPMALAVALTKSGEARGELFWDDGESLEVLERGAYTQVIFEARNNTIVNELVHVTSEGAGLQLGKVTVLGVATAPQQVLSNGRPVSNFTYSPDTKVLDICVALLMGEQFLVSWC

SEQ ID NO: 593 - DNA, 2832 bp, synthetic construct
  misc_feature 1..2832: note = Variant of the Homo Sapiens Lysosomal alpha-glucosidase
  source 1..2832: mol_type = other DNA
atggaatggagctgggtctttctcttcttcctgtcagtaacgactggtgtccactccggacacattctgtggcatgatttttctaccgtgcctagagagctttccggttcaagtcaagtcctcgaagaaacacatccagcccatcaggttggcgcatctaggccgggccctcgggacgctcaactccacccagggagacctagggccgttcccactcagtgcgacgtgccagagaactcacgcttcgattgtgcacctgagaaggctatcacgcaagagcagtgcgaggcccgcggatgttgttacataccggctaaacaggggctgcagggtgcgcagatgggccaaccttggtgcttcttcccaccatcctatccgagttacaagctggagaatctctcccagtctgaaatgggatataccgcaacactgactcggaccaccccctccttctttcccaaagatatcttgactctgagacttgacgtaatgatggagacagaaaacaggctccactttaccattaaggaccctgccaatcgccgatacgaggtgcctctggaaacaccacacgtgcacagtagagctccatcacctctgtattctgtcgagttctccgaagagccgtttggcgttatcgtcaggaggcagctcgacgggcgagtgcttctgaacacgactgtggccccgttgttctttgcggatcagtttctgcaactgtcaacaagtctcccttctcagtacattaccgggcttgcagagcatctgtccccactcatgctgagtacttcatggaacaaaatcacactgtggaatagagaccttgctcctactccaggagccaacttgtatggttctcaccctttctacttggccctggaagatggcggatcagcgcatggcgtattcctcctgaattccaacgcaatggacgttgttcttcagccatctcctgctttgagttggagatctacaggcgggatactggacgtctacatctttctgggtccagagcctaaatccgtagtgcagcagtatcttgatgtcgtcggatacccgtttatgccaccatattggggcctggggttccacttgtgccgctggggatattcatccaccgccattacacgacaagttgttgagaatatgaccagggcacattttcctctggatgtacagtggaacgacctggactacatggatagtcgccgcgacttcaccttcaataaggatgggttcagagactttcctgctatggtccaagaacttcaccagggaggcaggaggtacatgatgatcgtagatccgggaatttcttcttctggcccagccggttcatacagaccgtatgacgaaggactgcgacgaggcgtctttatcacgaacgagactggtcagcctttgataggcaaggtttggccagggtccaccgctttcccggatttcacaaatcctgaggcactggcctggtgggaagatatggtcgccgagtttcacgaccaggtcccatttgacgggatgtggatcgacatgaacgagccatccaacttcattagaggaagtgtggatggctgtccgaataatgagctggaaaaccctccttacgtaccaggcgttgttggtgggactcttcaagctgcgacgatttgcgcatcctcccatcagttcctgtcaacccactataacttgcacaatctgtacgggacaacagaggctatcgccagtcatagggccctggtaaaagctagaggaacacgccctttcgttatctctcgctcaacttttgcaggccacggtaggtatgccggacattggaccggcgacgtctggagttcttgggaacagctggcttcctccgttccagagatattgcagtttaacctgttgggagtcccacttgtaggtgcagatgtttgtggcttcctggggaacacctcagaagaattgtgcgtaagatggactcaactgggcgccttctacccttttatgcgcaatcacaactcactgacatctttgcctcaagaaccgtactcatttagtgagccagcacagcaggccatgaggaaggctcttggcctgagatatgcacttctgccgcatctgtacacccttttccaccaggctcatgtccatggagagactgttgcacgacctctgttcttggagttcccaaaagactcttccacgtggacagtcgatcaccagatgctgtggggcgaggctctgctgattacacctgtattgcaacctggtaaggccgaagttaccgggtactttccattggggacctggtatgatctgcaaacagtcccggttgaagctcttggaagtcttccacctccacctgctgcaccaagggagcctgcgatccactctgaaggacagtgggtaactttgcctgcaccgctggacaccatcaatgtccatctgcgcgaaggctacatcataccacttcaaggtcctggactgaccactacagagtctagaaaacaaccaatggctcttgctgttgcactgactaaaagcggcgaagcaaggggtgagctgttctgggacgacggagagtcactggaggtactcgaacgaggcgcgtatacgcaggtcattttttgggctcgcaataatacgatcgttaacgagctggtccacgtcacttcagaaggtgcaggccttcagttgggcaaggtaactgtcctgggagttgctacagcaccgcagcaggtcttgtccaacggacggcccgtaagcaactttacctatagtcctgataccaaagttctggacatctgcgttgctctgctgatgggtgagcagttcctggtatcatggtgc

SEQ ID NO: 594 - protein, 944 aa, synthetic construct
  REGION 1..944: note = Variant of the Homo Sapiens Lysosomal alpha-glucosidase
MEWSWVFLFFLSVTTGVHSGHILWHDFSTVPRELSGSSQVLEETHPAHQVGASRPGPRDAQLHPGRPRAVPTQCDVPENSRFDCAPEKAITQEQCEARGCCYIPAKQGLQGAQMGQPWCFFPPSYPSYKLENLSQSEMGYTATLTRTTPSFFPKDILTLRLDVMMETENRLHFTIKDPANRRYEVPLETPHVHSRAPSPLYSVEFSEEPFGVIVRRQLDGRVLLNTTVAPLFFADQFLQLSTSLPSQYITGLAEHLSPLMLSTSWNKITLWNRDLAPTPGANLYGSHPFYLALEDGGSAHGVFLLNSNAMDVVLQPSPALSWRSTGGILDVYIFLGPEPKSVVQQYLDVVGYPFMPPYWGLGFHLCRWGYSSTAITRQVVENMTRAHFPLDVQWNDLDYMDSRRDFTFNKDGFRDFPAMVQELHQGGRRYMMIVDPGISSSGPAGSYRPYDEGLRRGVFITNETGQPLIGKVWPGSTAFPDFTNPEALAWWEDMVAEFHDQVPFDGMWIDMNEPSNFIRGSVDGCPNNELENPPYVPGVVGGTLQAATICASSHQFLSTHYNLHNLYGTTEAIASHRALVKARGTRPFVISRSTFAGHGRYAGHWTGDVWSSWEQLASSVPEILQFNLLGVPLVGADVCGFLGNTSEELCVRWTQLGAFYPFMRNHNSLTSLPQEPYSFSEPAQQAMRKALGLRYALLPHLYTLFHQAHVHGETVARPLFLEFPKDSSTWTVDHQMLWGEALLITPVLQPGKAEVTGYFPLGTWYDLQTVPVEALGSLPPPPAAPREPAIHSEGQWVTLPAPLDTINVHLREGYIIPLQGPGLTTTESRKQPMALAVALTKSGEARGELFWDDGESLEVLERGAYTQVIFWARNNTIVNELVHVTSEGAGLQLGKVTVLGVATAPQQVLSNGRPVSNFTYSPDTKVLDICVALLMGEQFLVSWC

SEQ ID NO: 595 - DNA, 2832 bp, synthetic construct
  misc_feature 1..2832: note = Variant of the Homo Sapiens Lysosomal alpha-glucosidase
  source 1..2832: mol_type = other DNA
atggaatggagctgggtctttctcttcttcctgtcagtaacgactggtgtccactccggacacattctgtggcatgatttttctaccgtgcctagagagctttccggttcaagtcaagtcctcgaagaaacacatccagcccatcaggttggcgcatctaggccgggccctcgggacgctcaactccacccagggagacctagggccgttcccactcagtgcgacgtgccagagaactcacgcttcgattgtgcacctgagaaggctatcacgcaagagcagtgcgaggcccgcggatgttgttacataccggctaaacaggggctgcagggtgcgcagatgggccaaccttggtgcttcttcccaccatcctatccgagttacaagctggagaatctctcctactctgaaatgggatataccgcaacactgactcggaccaccccctccttctttcccaaagatatcttgactctgagacttgacgtaatgatggagacagaaaacaggctccactttaccattaaggaccctgccaatcgccgatacgaggtgcctctggaaacaccacacgtgcacagtagagctccatcacctctgtattctgtcgagttctccgaagagccgtttggcgttatcgtcaggaggcagctcgacgggcgagtgcttctgaacacgactgtggccccgttgttctttgcggatcagtttctgcaactgtcaacaagtctcccttctcagtacattaccgggcttgcagagcatctgtccccactcatgctgagtacttcatggaacaaaatcacactgtggaatagagaccttgctcctactccaggagccaacttgtatggttctcaccctttctacttggccctggaagatggcggatcagcgcatggcgtattcctcctgaattccaacgcaatggacgttgttcttcagccatctcctgctttgagttggagatctacaggcgggatactggacgtctacatctttctgggtccagagcctaaatccgtagtgcagcagtatcttgatgtcgtcggatacccgtttatgccaccatattggggcctggggttccacttgtgccgctggggatattcatccaccgccattacacgacaagttgttgagaatatgaccagggcacattttcctctggatgtacagtggaacgacctggactacatggatagtcgccgcgacttcaccttcaataaggatgggttcagagactttcctgctatggtccaagaacttcaccagggaggcaggaggtacatgatgatcgtagatccgggaatttcttcttctggcccagccggttcatacagaccgtatgacgaaggactgcgacgaggcgtctttatcacgaacgagactggtcagcctttgataggcaaggtttggccagggtccaccgctttcccggatttcacaaatcctgaggcactggcctggtgggaagatatggtcgccgagtttcacgaccaggtcccatttgacgggatgtggatcgacatgaacgagccatccaacttcattagaggaagtgtggatggctgtccgaataatgagctggaaaaccctccttacgtaccaggcgttgttggtgggactcttcaagctgcgacgatttgcgcatcctcccatcagttcctgtcaacccactataacttgcacaatctgtacgggacaacagaggctatcgccagtcatagggccctggtaaaagctagaggaacacgccctttcgttatctctcgctcaacttttgcaggccacggtaggtatgccggacattggaccggcgacgtctggagttcttgggaacagctggcttcctccgttccagagatattgcagtttaacctgttgggagtcccacttgtaggtgcagatgtttgtggcttcctggggaacacctcagaagaattgtgcgtaagatggactcaactgggcgccttctacccttttatgcgcaatcacaactcactgacatctttgcctcaagaaccgtactcatttagtgagccagcacagcaggccatgaggaaggctcttggcctgagatatgcacttctgccgcatctgtacacccttttccaccaggctcatgtccatggagagactgttgcacgacctctgttcttggagttcccaaaagactcttccacgtggacagtcgatcaccagatgctgtggggcgaggctctgctgattacacctgtattgcaacctggtaaggccgaagttaccgggtactttccattggggacctggtatgatctgcaaacagtcccggttgaagctcttggaagtcttccacctccacctgctgcaccaagggagcctgcgatccactctgaaggacagtgggtaactttgcctgcaccgctggacaccatcaatgtccatctgcgcgaaggctacatcataccacttcaaggtcctggactgaccactacagagtctagaaaacaaccaatggctcttgctgttgcactgactaaaagcggcgaagcaaggggtgagctgttctgggacgacggagagtcactggaggtactcgaacgaggcgcgtatacgcaggtcatttttgaggctcgcaataatacgatcgttaacgagctggtccacgtcacttcagaaggtgcaggccttcagttgggcaaggtaactgtcctgggagttgctacagcaccgcagcaggtcttgtccaacggacggcccgtaagcaactttacctatagtcctgataccaaagttctggacatctgcgttgctctgctgatgggtgagcagttcctggtatcatggtgc

SEQ ID NO: 596 - protein, 944 aa, synthetic construct
  REGION 1..944: note = Variant of the Homo Sapiens Lysosomal alpha-glucosidase
MEWSWVFLFFLSVTTGVHSGHILWHDFSTVPRELSGSSQVLEETHPAHQVGASRPGPRDAQLHPGRPRAVPTQCDVPENSRFDCAPEKAITQEQCEARGCCYIPAKQGLQGAQMGQPWCFFPPSYPSYKLENLSYSEMGYTATLTRTTPSFFPKDILTLRLDVMMETENRLHFTIKDPANRRYEVPLETPHVHSRAPSPLYSVEFSEEPFGVIVRRQLDGRVLLNTTVAPLFFADQFLQLSTSLPSQYITGLAEHLSPLMLSTSWNKITLWNRDLAPTPGANLYGSHPFYLALEDGGSAHGVFLLNSNAMDVVLQPSPALSWRSTGGILDVYIFLGPEPKSVVQQYLDVVGYPFMPPYWGLGFHLCRWGYSSTAITRQVVENMTRAHFPLDVQWNDLDYMDSRRDFTFNKDGFRDFPAMVQELHQGGRRYMMIVDPGISSSGPAGSYRPYDEGLRRGVFITNETGQPLIGKVWPGSTAFPDFTNPEALAWWEDMVAEFHDQVPFDGMWIDMNEPSNFIRGSVDGCPNNELENPPYVPGVVGGTLQAATICASSHQFLSTHYNLHNLYGTTEAIASHRALVKARGTRPFVISRSTFAGHGRYAGHWTGDVWSSWEQLASSVPEILQFNLLGVPLVGADVCGFLGNTSEELCVRWTQLGAFYPFMRNHNSLTSLPQEPYSFSEPAQQAMRKALGLRYALLPHLYTLFHQAHVHGETVARPLFLEFPKDSSTWTVDHQMLWGEALLITPVLQPGKAEVTGYFPLGTWYDLQTVPVEALGSLPPPPAAPREPAIHSEGQWVTLPAPLDTINVHLREGYIIPLQGPGLTTTESRKQPMALAVALTKSGEARGELFWDDGESLEVLERGAYTQVIFEARNNTIVNELVHVTSEGAGLQLGKVTVLGVATAPQQVLSNGRPVSNFTYSPDTKVLDICVALLMGEQFLVSWC

SEQ ID NO: 597 - DNA, 2832 bp, synthetic construct
  misc_feature 1..2832: note = Variant of the Homo Sapiens Lysosomal alpha-glucosidase
  source 1..2832: mol_type = other DNA
atggaatggagctgggtctttctcttcttcctgtcagtaacgactggtgtccactccggacacattctgtggcatgatttttctaccgtgcctagagagctttccggttcaagtcaagtcctcgaagaaacacatccagcccatcaggttggcgcatctaggccgggccctcgggacgctcaactccacccagggagacctagggccgttcccactcagtgcgacgtgccagagaactcacgcttcgattgtgcacctgagaaggctatcacgcaagagcagtgcgaggcccgcggatgttgttacataccggctaaacaggggctgcagggtgcgcagatgggccaaccttggtgcttcttcccaccatcctatccgagttacaagctggagaatctctcccagtctgaaatgggatataccgcaacactgactcggaccaccccctccttctttcccaaagatatcttgactctgagacttgacgtaatgatggagacagaaaacaggctccactttaccattaaggaccctgccaatcgccgatacgaggtgcctctggaaacaccacacgtgcacagtagagctccatcacctctgtattctgtcgagttctccgaagagccgtttggcgttatcgtcaggaggcagctcgacgggcgagtgcttctgaacacgactgtggccccgttgttctttgcggatcagtttctgcaactgtcaacaagtctcccttctcagtacattaccgggcttgcagagcatctgtccccactcatgctgagtacttcatggaacaaaatcacactgtggaatagagaccttgctcctactccaggagccaacttgtatggttctcaccctttctacttggccctggaagatggcggatcagcgcatggcgtattcctcctgaattccaacgcaatggacgttgttcttcagccatctcctgctttgagttggagatctacaggcgggatactggacgtctacatctttctgggtccagagcctaaatccgtagtgcagcagtatcttgatgtcgtcggatacccgtttatgccaccatattggggcctggggttccacttgtgccgctggggatattcatccaccgccattacacgacaagttgttgagaatatgaccagggcacattttcctctggatgtacagtggaacgacctggactacatggatagtcgccgcgacttcaccttcaataaggatgggttcagagactttcctgctatggtccaagaacttcaccagggaggcaggaggtacatgatgatcgtagatccgggaatttcttcttctggcccagccggttcatacagaccgtatgacgaaggactgcgacgaggcgtctttatcacgaacgagactggtcagcctttgataggcaaggtttggccagggtccaccgctttcccggatttcacaaatcctgaggcactggcctggtgggaagatatggtcgccgagtttcacgaccaggtcccatttgacgggatgtggatcgacatgaacgagccatccaacttcattagaggaagtgtggatggctgtccgaataatgagctggaaaaccctccttacgtaccaggcgttgttggtgggactcttcaagctgcgacgatttgcgcatcctcccatcagttcctgtcaacccactataacttgcacaatctgtacgggacaacagaggctatcgccagtcatagggccctggtaaaagctagaggaacacgccctttcgttatctctcgctcaacttttgcaggccacggtaggtatgccggacattggaccggcgacgtctggagttcttgggaacagctggcttcctccgttccagagatattgcagtttaacctgttgggagtcccacttgtaggtgcagatgtttgtggcttcctggggaacacctcagaagaattgtgcgtaagatggactcaactgggcgccttctacccttttatgcgcaatcacaactcactgacatctttgcctcaagaaccgtactcatttagtgagccagcacagcaggccatgaggaaggctcttggcctgagatatgcacttctgccgcatctgtacacccttttccaccaggctcatgtccatggagagactgttgcacgacctctgttcttggagttcccaaaagactcttccacgtggacagtcgatcaccagatgctgtggggcgaggctctgctgattacacctgtattgcaacctggtaaggccgaagttaccgggtactttccattggggacctggtatgatctgcaaacagtcccggttgaagctcttggaagtcttccacctccacctgctgcaccaagggagcctgcgatccactctgaaggacagtgggtaactttgcctgcaccgctggacaccatcaatgtccatctgcgcgaaggctacatcataccacttcaaggtcctggactgaccactacagagtctagaaaacaaccaatggctcttgctgttgcactgactaaacagggcgaagcaaggggtgagctgttctgggacgacggagagtcactggaggtactcgaacgaggcgcgtatacgcaggtcatttttgaggctcgcaataatacgatcgttaacgagctggtccacgtcacttcagaaggtgcaggccttcagttgggcaaggtaactgtcctgggagttgctacagcaccgcagcaggtcttgtccaacggacggcccgtaagcaactttacctatagtcctgataccaaagttctggacatctgcgttgctctgctgatgggtgagcagttcctggtatcatggtgc

SEQ ID NO: 598 - protein, 944 aa, synthetic construct
  REGION 1..944: note = Variant of the Homo Sapiens Lysosomal alpha-glucosidase
MEWSWVFLFFLSVTTGVHSGHILWHDFSTVPRELSGSSQVLEETHPAHQVGASRPGPRDAQLHPGRPRAVPTQCDVPENSRFDCAPEKAITQEQCEARGCCYIPAKQGLQGAQMGQPWCFFPPSYPSYKLENLSQSEMGYTATLTRTTPSFFPKDILTLRLDVMMETENRLHFTIKDPANRRYEVPLETPHVHSRAPSPLYSVEFSEEPFGVIVRRQLDGRVLLNTTVAPLFFADQFLQLSTSLPSQYITGLAEHLSPLMLSTSWNKITLWNRDLAPTPGANLYGSHPFYLALEDGGSAHGVFLLNSNAMDVVLQPSPALSWRSTGGILDVYIFLGPEPKSVVQQYLDVVGYPFMPPYWGLGFHLCRWGYSSTAITRQVVENMTRAHFPLDVQWNDLDYMDSRRDFTFNKDGFRDFPAMVQELHQGGRRYMMIVDPGISSSGPAGSYRPYDEGLRRGVFITNETGQPLIGKVWPGSTAFPDFTNPEALAWWEDMVAEFHDQVPFDGMWIDMNEPSNFIRGSVDGCPNNELENPPYVPGVVGGTLQAATICASSHQFLSTHYNLHNLYGTTEAIASHRALVKARGTRPFVISRSTFAGHGRYAGHWTGDVWSSWEQLASSVPEILQFNLLGVPLVGADVCGFLGNTSEELCVRWTQLGAFYPFMRNHNSLTSLPQEPYSFSEPAQQAMRKALGLRYALLPHLYTLFHQAHVHGETVARPLFLEFPKDSSTWTVDHQMLWGEALLITPVLQPGKAEVTGYFPLGTWYDLQTVPVEALGSLPPPPAAPREPAIHSEGQWVTLPAPLDTINVHLREGYIIPLQGPGLTTTESRKQPMALAVALTKQGEARGELFWDDGESLEVLERGAYTQVIFEARNNTIVNELVHVTSEGAGLQLGKVTVLGVATAPQQVLSNGRPVSNFTYSPDTKVLDICVALLMGEQFLVSWC

SEQ ID NO: 599 - DNA, 2832 bp, synthetic construct
  misc_feature 1..2832: note = Variant of the Homo Sapiens Lysosomal alpha-glucosidase
  source 1..2832: mol_type = other DNA
atggaatggagctgggtctttctcttcttcctgtcagtaacgactggtgtccactccggacacattctgtggcatgatttttctcacgtgcctagagagctttccggttcaagtcaagtcctcgaagaaacacatccagcccatcaggttggcgcatctaggccgggccctcgggacgctcaactccacccagggagacctagggccgttcccactcagtgcgacgtgccagagaactcacgcttcgattgtgcacctgagaaggctatcacgcaagagcagtgcgaggcccgcggatgttgttacataccggctaaacaggggctgcagggtgcgcagatgggccaaccttggtgcttcttcccaccatcctatccgagttacaagctggagaatctctcccagtctgaaatgggatataccgcaacactgactcggaccaccccctccttctttcccaaagatatcttgactctgagacttgacgtaatgatggagacagaaaacaggctccactttaccattaaggaccctgccaatcgccgatacgaggtgcctctggaaacaccacacgtgcacagtagagctccatcacctctgtattctgtcgagttctccgaagagccgtttggcgttatcgtcaggaggcagctcgacgggcgagtgcttctgaacacgactgtggccccgttgttctttgcggatcagtttctgcaactgtcaacaagtctcccttctcagtacattaccgggcttgcagagcatctgtccccactcatgctgagtacttcatggaacaaaatcacactgtggaatagagaccttgctcctactccaggagccaacttgtatggttctcaccctttctacttggccctggaagatggcggatcagcgcatggcgtattcctcctgaattccaacgcaatggacgttgttcttcagccatctcctgctttgagttggagatctacaggcgggatactggacgtctacatctttctgggtccagagcctaaatccgtagtgcagcagtatcttgatgtcgtcggatacccgtttatgccaccatattggggcctggggttccacttgtgccgctggggatattcatccaccgccattacacgacaagttgttgagaatatgaccagggcacattttcctctggatgtacagtggaacgacctggactacatggatagtcgccgcgacttcaccttcaataaggatgggttcagagactttcctgctatggtccaagaacttcaccagggaggcaggaggtacatgatgatcgtagatccgggaatttcttcttctggcccagccggttcatacagaccgtatgacgaaggactgcgacgaggcgtctttatcacgaacgagactggtcagcctttgataggcaaggtttggccagggtccaccgctttcccggatttcacaaatcctgaggcactggcctggtgggaagatatggtcgccgagtttcacgaccaggtcccatttgacgggatgtggatcgacatgaacgagccatccaacttcattagaggaagtgtggatggctgtccgaataatgagctggaaaaccctccttacgtaccaggcgttgttggtgggactcttcaagctgcgacgatttgcgcatcctcccatcagttcctgtcaacccactataacttgcacaatctgtacgggacaacagaggctatcgccagtcatagggccctggtaaaagctagaggaacacgccctttcgttatctctcgctcaacttttgcaggccacggtaggtatgccggacattggaccggcgacgtctggagttcttgggaacagctggcttcctccgttccagagatattgcagtttaacctgttgggagtcccacttgtaggtgcagatgtttgtggcttcctggggaacacctcagaagaattgtgcgtaagatggactcaactgggcgccttctacccttttatgcgcaatcacaactcactgacatctttgcctcaagaaccgtactcatttagtgagccagcacagcaggccatgaggaaggctcttggcctgagatatgcacttctgccgcatctgtacacccttttccaccaggctcatgtccatggagagactgttgcacgacctctgttcttggagttcccaaaagactcttccacgtggacagtcgatcaccagatgctgtggggcgaggctctgctgattacacctgtattgcaacctggtaaggccgaagttaccgggtactttccattggggacctggtatgatctgcaaacagtcccggttgaagctcttggaagtcttccacctccacctgctgcaccaagggagcctgcgatccactctgaaggacagtgggtaactttgcctgcaccgctggacaccatcaatgtccatctgcgcgaaggctacatcataccacttcaaggtcctggactgaccactacagagtctagaaaacaaccaatggctcttgctgttgcactgactaaaagcggcgaagcaaggggtgagctgttctgggacgacggagagtcactggaggtactcgaacgaggcgcgtatacgcaggtcatttttgaggctcgcaataatacgatcgttaacgagctggtccacgtcacttcagaaggtgcaggccttcagttgggcaaggtaactgtcctgggagttgctacagcaccgcagcaggtcttgtccaacggacggcccgtaagcaactttacctatagtcctgataccaaagttctggacatctgcgttgctctgctgatgggtgagcagttcctggtatcatggtgc

SEQ ID NO: 600 - protein, 944 aa, synthetic construct
  REGION 1..944: note = Variant of the Homo Sapiens Lysosomal alpha-glucosidase
MEWSWVFLFFLSVTTGVHSGHILWHDFSHVPRELSGSSQVLEETHPAHQVGASRPGPRDAQLHPGRPRAVPTQCDVPENSRFDCAPEKAITQEQCEARGCCYIPAKQGLQGAQMGQPWCFFPPSYPSYKLENLSQSEMGYTATLTRTTPSFFPKDILTLRLDVMMETENRLHFTIKDPANRRYEVPLETPHVHSRAPSPLYSVEFSEEPFGVIVRRQLDGRVLLNTTVAPLFFADQFLQLSTSLPSQYITGLAEHLSPLMLSTSWNKITLWNRDLAPTPGANLYGSHPFYLALEDGGSAHGVFLLNSNAMDVVLQPSPALSWRSTGGILDVYIFLGPEPKSVVQQYLDVVGYPFMPPYWGLGFHLCRWGYSSTAITRQVVENMTRAHFPLDVQWNDLDYMDSRRDFTFNKDGFRDFPAMVQELHQGGRRYMMIVDPGISSSGPAGSYRPYDEGLRRGVFITNETGQPLIGKVWPGSTAFPDFTNPEALAWWEDMVAEFHDQVPFDGMWIDMNEPSNFIRGSVDGCPNNELENPPYVPGVVGGTLQAATICASSHQFLSTHYNLHNLYGTTEAIASHRALVKARGTRPFVISRSTFAGHGRYAGHWTGDVWSSWEQLASSVPEILQFNLLGVPLVGADVCGFLGNTSEELCVRWTQLGAFYPFMRNHNSLTSLPQEPYSFSEPAQQAMRKALGLRYALLPHLYTLFHQAHVHGETVARPLFLEFPKDSSTWTVDHQMLWGEALLITPVLQPGKAEVTGYFPLGTWYDLQTVPVEALGSLPPPPAAPREPAIHSEGQWVTLPAPLDTINVHLREGYIIPLQGPGLTTTESRKQPMALAVALTKSGEARGELFWDDGESLEVLERGAYTQVIFEARNNTIVNELVHVTSEGAGLQLGKVTVLGVATAPQQVLSNGRPVSNFTYSPDTKVLDICVALLMGEQFLVSWC

SEQ ID NO: 601 - DNA, 2832 bp, synthetic construct
  misc_feature 1..2832: note = Variant of the Homo Sapiens Lysosomal alpha-glucosidase
  source 1..2832: mol_type = other DNA
atggaatggagctgggtctttctcttcttcctgtcagtaacgactggtgtccactccggacacattctgtggcatgatttttctaccgtgcctagagagctttccggttcaagtcaagtcctcgaagaaacacatccagcccatcaggttggcgcatctaggccgggccctcgggacgctcaactccacccagggagacctagggccgttcccactcagtgcgacgtgccacagaactcacgcttcgattgtgcacctgagaaggctatcacgcaagagcagtgcgaggcccgcggatgttgttacataccggctaaacaggggctgcagggtgcgcagatgggccaaccttggtgcttcttcccaccatcctatccgagttacaagctggagaatctctcccagtctgaaatgggatataccgcaacactgactcggaccaccccctccttctttcccaaagatatcttgactctgagacttgacgtaatgatggagacagaaaacaggctccactttaccattaaggaccctgccaatcgccgatacgaggtgcctctggaaacaccacacgtgcacagtagagctccatcacctctgtattctgtcgagttctccgaagagccgtttggcgttatcgtcaggaggcagctcgacgggcgagtgcttctgaacacgactgtggccccgttgttctttgcggatcagtttctgcaactgtcaacaagtctcccttctcagtacattaccgggcttgcagagcatctgtccccactcatgctgagtacttcatggaacaaaatcacactgtggaatagagaccttgctcctactccaggagccaacttgtatggttctcaccctttctacttggccctggaagatggcggatcagcgcatggcgtattcctcctgaattccaacgcaatggacgttgttcttcagccatctcctgctttgagttggagatctacaggcgggatactggacgtctacatctttctgggtccagagcctaaatccgtagtgcagcagtatcttgatgtcgtcggatacccgtttatgccaccatattggggcctggggttccacttgtgccgctggggatattcatccaccgccattacacgacaagttgttgagaatatgaccagggcacattttcctctggatgtacagtggaacgacctggactacatggatagtcgccgcgacttcaccttcaataaggatgggttcagagactttcctgctatggtccaagaacttcaccagggaggcaggaggtacatgatgatcgtagatccgggaatttcttcttctggcccagccggttcatacagaccgtatgacgaaggactgcgacgaggcgtctttatcacgaacgagactggtcagcctttgataggcaaggtttggccagggtccaccgctttcccggatttcacaaatcctgaggcactggcctggtgggaagatatggtcgccgagtttcacgaccaggtcccatttgacgggatgtggatcgacatgaacgagccatccaacttcattagaggaagtgtggatggctgtccgaataatgagctggaaaaccctccttacgtaccaggcgttgttggtgggactcttcaagctgcgacgatttgcgcatcctcccatcagttcctgtcaacccactataacttgcacaatctgtacgggacaacagaggctatcgccagtcatagggccctggtaaaagctagaggaacacgccctttcgttatctctcgctcaacttttgcaggccacggtaggtatgccggacattggaccggcgacgtctggagttcttgggaacagctggcttcctccgttccagagatattgcagtttaacctgttgggagtcccacttgtaggtgcagatgtttgtggcttcctggggaacacctcagaagaattgtgcgtaagatggactcaactgggcgccttctacccttttatgcgcaatcacaactcactgacatctttgcctcaagaaccgtactcatttagtgagccagcacagcaggccatgaggaaggctcttggcctgagatatgcacttctgccgcatctgtacacccttttccaccaggctcatgtccatggagagactgttgcacgacctctgttcttggagttcccaaaagactcttccacgtggacagtcgatcaccagatgctgtggggcgaggctctgctgattacacctgtattgcaacctggtaaggccgaagttaccgggtactttccattggggacctggtatgatctgcaaacagtcccggttgaagctcttggaagtcttccacctccacctgctgcaccaagggagcctgcgatccactctgaaggacagtgggtaactttgcctgcaccgctggacaccatcaatgtccatctgcgcgaaggctacatcataccacttcaaggtcctggactgaccactacagagtctagaaaacaaccaatggctcttgctgttgcactgactaaaagcggcgaagcaaggggtgagctgttctgggacgacggagagtcactggaggtactcgaacgaggcgcgtatacgcaggtcatttttgaggctcgcaataatacgatcgttaacgagctggtccacgtcacttcagaaggtgcaggccttcagttgggcaaggtaactgtcctgggagttgctacagcaccgcagcaggtcttgtccaacggacggcccgtaagcaactttacctatagtcctgataccaaagttctggacatctgcgttgctctgctgatgggtgagcagttcctggtatcatggtgc

SEQ ID NO: 602 - protein, 944 aa, synthetic construct
  REGION 1..944: note = Variant of the Homo Sapiens Lysosomal alpha-glucosidase
MEWSWVFLFFLSVTTGVHSGHILWHDFSTVPRELSGSSQVLEETHPAHQVGASRPGPRDAQLHPGRPRAVPTQCDVPQNSRFDCAPEKAITQEQCEARGCCYIPAKQGLQGAQMGQPWCFFPPSYPSYKLENLSQSEMGYTATLTRTTPSFFPKDILTLRLDVMMETENRLHFTIKDPANRRYEVPLETPHVHSRAPSPLYSVEFSEEPFGVIVRRQLDGRVLLNTTVAPLFFADQFLQLSTSLPSQYITGLAEHLSPLMLSTSWNKITLWNRDLAPTPGANLYGSHPFYLALEDGGSAHGVFLLNSNAMDVVLQPSPALSWRSTGGILDVYIFLGPEPKSVVQQYLDVVGYPFMPPYWGLGFHLCRWGYSSTAITRQVVENMTRAHFPLDVQWNDLDYMDSRRDFTFNKDGFRDFPAMVQELHQGGRRYMMIVDPGISSSGPAGSYRPYDEGLRRGVFITNETGQPLIGKVWPGSTAFPDFTNPEALAWWEDMVAEFHDQVPFDGMWIDMNEPSNFIRGSVDGCPNNELENPPYVPGVVGGTLQAATICASSHQFLSTHYNLHNLYGTTEAIASHRALVKARGTRPFVISRSTFAGHGRYAGHWTGDVWSSWEQLASSVPEILQFNLLGVPLVGADVCGFLGNTSEELCVRWTQLGAFYPFMRNHNSLTSLPQEPYSFSEPAQQAMRKALGLRYALLPHLYTLFHQAHVHGETVARPLFLEFPKDSSTWTVDHQMLWGEALLITPVLQPGKAEVTGYFPLGTWYDLQTVPVEALGSLPPPPAAPREPAIHSEGQWVTLPAPLDTINVHLREGYIIPLQGPGLTTTESRKQPMALAVALTKSGEARGELFWDDGESLEVLERGAYTQVIFEARNNTIVNELVHVTSEGAGLQLGKVTVLGVATAPQQVLSNGRPVSNFTYSPDTKVLDICVALLMGEQFLVSWC

SEQ ID NO: 603 - DNA, 2832 bp, synthetic construct
  misc_feature 1..2832: note = Variant of the Homo Sapiens Lysosomal alpha-glucosidase
  source 1..2832: mol_type = other DNA
atggaatggagctgggtctttctcttcttcctgtcagtaacgactggtgtccactccggacacattctgtggcatgatttttctaccgtgcctagagagctttccggttcaagtcaagtcctcgaagaaacacatccagcccatcaggttggcgcatctaggccgggccctcgggacgctcaactccacccagggagacctagggccgttcccactcagtgcgacgtgccagagaactcacgcttcgattgtgcacctgagaaggctatcacgcaagagcagtgcgaggcccgcggatgttgttacataccggctaaacaggggctgcagggtgcgcagatgggccaaccttggtgcttcttcccaccatcctatccgagttacaagctggagaatctctcccagtctgaaatgggatataccgcaacactgactcggaccaccccctccttctttcccaaagatatcttgactctgagacttgacgtaatgatggagacagaaaacaggctccactttaccattaaggaccctgccaatcgccgatacgaggtgcctctggaaacaccacacgtgcacagtagagctccatcacctctgtattctgtcgagttctccgaagagccgtttggcgttatcgtcaggaggcagctcgacgggcgagtgcttctgaacacgactgtggccccgttgttctttgcggatcagtttctgcaactgtcaacaagtctcccttctcagtacattaccgggcttgcagagcatctgtccccactcatgctgagtacttcatggaacaaaatcacactgtggaatagagaccttgctcctactccaggagccaacttgtatggttctcaccctttctacttggccctggaagatggcggatcagcgcatggcgtattcctcctgaattccaacgcaatggacgttgttcttcagccatctcctgctttgagttggagatctacaggcgggatactggacgtctacatctttctgggtccagagcctaaatccgtagtgcagcagtatcttgatgtcgtcggatacccgtttatgccaccatattggggcctggggttccacttgtgccgctggggatattcatccaccgccattacacgacaagttgttgagaatatgaccagggcacattttcctctggatgtacagtggaacgacctggactacatggatagtcgccgcgacttcaccttcaataaggatgggttcagagactttcctgctatggtccaagaacttcaccagggaggcaggaggtacatgatgatcgtagatccgggaatttcttcttctggcccagccggttcatacagaccgtatgacgaaggactgcgacgaggcgtctttatcacgaacgagactggtcagcctttgataggcaaggtttggccagggtccaccgctttcccggatttcacaaatcctgaggcactggcctggtgggaagatatggtcgccgagtttcacgaccaggtcccatttgacgggatgtggatcgacatgaacgagccatccaacttcattagaggaagtgacgatggctgtccgaataatgagctggaaaaccctccttacgtaccaggcgttgttggtgggactcttcaagctgcgacgatttgcgcatcctcccatcagttcctgtcaacccactataacttgcacaatctgtacgggacaacagaggctatcgccagtcatagggccctggtaaaagctagaggaacacgccctttcgttatctctcgctcaacttttgcaggccacggtaggtatgccggacattggaccggcgacgtctggagttcttgggaacagctggcttcctccgttccagagatattgcagtttaacctgttgggagtcccacttgtaggtgcagatgtttgtggcttcctggggaacacctcagaagaattgtgcgtaagatggactcaactgggcgccttctacccttttatgcgcaatcacaactcactgacatctttgcctcaagaaccgtactcatttagtgagccagcacagcaggccatgaggaaggctcttggcctgagatatgcacttctgccgcatctgtacacccttttccaccaggctcatgtccatggagagactgttgcacgacctctgttcttggagttcccaaaagactcttccacgtggacagtcgatcaccagatgctgtggggcgaggctctgctgattacacctgtattgcaacctggtaaggccgaagttaccgggtactttccattggggacctggtatgatctgcaaacagtcccggttgaagctcttggaagtcttccacctccacctgctgcaccaagggagcctgcgatccactctgaaggacagtgggtaactttgcctgcaccgctggacaccatcaatgtccatctgcgcgaaggctacatcataccacttcaaggtcctggactgaccactacagagtctagaaaacaaccaatggctcttgctgttgcactgactaaaagcggcgaagcaaggggtgagctgttctgggacgacggagagtcactggaggtactcgaacgaggcgcgtatacgcaggtcatttttgaggctcgcaataatacgatcgttaacgagctggtccacgtcacttcagaaggtgcaggccttcagttgggcaaggtaactgtcctgggagttgctacagcaccgcagcaggtcttgtccaacggacggcccgtaagcaactttacctatagtcctgataccaaagttctggacatctgcgttgctctgctgatgggtgagcagttcctggtatcatggtgc

SEQ ID NO: 604 - protein, 944 aa, synthetic construct
  REGION 1..944: note = Variant of the Homo Sapiens Lysosomal alpha-glucosidase
MEWSWVFLFFLSVTTGVHSGHILWHDFSTVPRELSGSSQVLEETHPAHQVGASRPGPRDAQLHPGRPRAVPTQCDVPENSRFDCAPEKAITQEQCEARGCCYIPAKQGLQGAQMGQPWCFFPPSYPSYKLENLSQSEMGYTATLTRTTPSFFPKDILTLRLDVMMETENRLHFTIKDPANRRYEVPLETPHVHSRAPSPLYSVEFSEEPFGVIVRRQLDGRVLLNTTVAPLFFADQFLQLSTSLPSQYITGLAEHLSPLMLSTSWNKITLWNRDLAPTPGANLYGSHPFYLALEDGGSAHGVFLLNSNAMDVVLQPSPALSWRSTGGILDVYIFLGPEPKSVVQQYLDVVGYPFMPPYWGLGFHLCRWGYSSTAITRQVVENMTRAHFPLDVQWNDLDYMDSRRDFTFNKDGFRDFPAMVQELHQGGRRYMMIVDPGISSSGPAGSYRPYDEGLRRGVFITNETGQPLIGKVWPGSTAFPDFTNPEALAWWEDMVAEFHDQVPFDGMWIDMNEPSNFIRGSDDGCPNNELENPPYVPGVVGGTLQAATICASSHQFLSTHYNLHNLYGTTEAIASHRALVKARGTRPFVISRSTFAGHGRYAGHWTGDVWSSWEQLASSVPEILQFNLLGVPLVGADVCGFLGNTSEELCVRWTQLGAFYPFMRNHNSLTSLPQEPYSFSEPAQQAMRKALGLRYALLPHLYTLFHQAHVHGETVARPLFLEFPKDSSTWTVDHQMLWGEALLITPVLQPGKAEVTGYFPLGTWYDLQTVPVEALGSLPPPPAAPREPAIHSEGQWVTLPAPLDTINVHLREGYIIPLQGPGLTTTESRKQPMALAVALTKSGEARGELFWDDGESLEVLERGAYTQVIFEARNNTIVNELVHVTSEGAGLQLGKVTVLGVATAPQQVLSNGRPVSNFTYSPDTKVLDICVALLMGEQFLVSWC

SEQ ID NO: 605 - DNA, 2832 bp, synthetic construct
  misc_feature 1..2832: note = Variant of the Homo Sapiens Lysosomal alpha-glucosidase
  source 1..2832: mol_type = other DNA
atggaatggagctgggtctttctcttcttcctgtcagtaacgactggtgtccactccggacacattctgtggcatgatttttctaccgtgcctagagagctttccggttcaagtcaagtcctcgaagaaacacatccagcccatcaggttggcgcatctaggccgggccctcgggacgctcaactccacccagggagacctagggccgttcccactcagtgcgacgtgccagagaactcacgcttcgattgtgcacctgagaaggctatcacgcaagagcagtgcgaggcccgcggatgttgttacataccggctaaacaggggctgcagggtgcgcagatgggccaaccttggtgcttcttcccaccatcctatccgagttacaagctggagaatctctcccagtctgaaatgggatataccgcaacactgactcggaccaccccctccttctttcccaaagatatcttgactctgagacttgacgtaatgatggagacagaaaacaggctccactttaccattaaggaccctgccaatcgccgatacgaggtgcctctggaaacaccacacgtgcacagtagagctccatcacctctgtattctgtcgagttctccgaagagccgtttggcgttatcgtcaggaggcagctcgacgggcgagtgcttctgaacacgactgtggccccgttgttctttgcggatcagtttctgcaactgtcaacaagtctcccttctcagtacattaccgggcttgcagagcatctgtccccactcatgctgagtacttcatggaacaaaatcacactgtggaatagagaccttgctcctactccaggagccaacttgtatggttctcaccctttctacttggccctggaagatggcggatcagcgcatggcgtattcctcctgaattccaacgcaatggacgttgttcttcagccatctcctgctttgagttggagatctacaggcgggatactggacgtctacatctttctgggtccagagcctaaatccgtagtgcagcagtatcttgatgtcgtcggatacccgtttatgccaccatattggggcctggggttccacttgtgccgctggggatattcatccaccgccattacacgacaagttgttgagaatatgaccagggcacattttcctctggatgtacagtggaacgacctggactacatggatagtcgccgcgacttcaccttcaataaggatgggttcagagactttcctgctatggtccaagaacttcaccagggaggcaggaggtacatgatgatcgtagatccgggaatttcttcttctggcccagccggttcatacagaccgtatgacgaaggactgcgacgaggcgtctttatcacgaacgagactggtcagcctttgataggcaaggtttggccagggtccaccgctttcccggatttcacaaatcctgaggcactggcctggtgggaagatatggtcgccgagtttcacgaccaggtcccatttgacgggatgtggatcgacatgaacgagccatccaacttcattagaggaagtgtggatggctgtccgaataatgagctggaaaaccctccttacgtaccaggcgttgttggtgggactcttcaagctgcgacgatttgcgcatcctcccatcagttcctgtcaacccactataacttgcacaatctgtacgggacaacagaggctatcgccagtcatagggccctggtaaaagctagaggaacacgccctttcgttatctctcgctcaacttttgcaggccacggtaggtatgccggacattggaccggcgacgtctggagttcttgggaacagctggcttcctccgttccagagatattgcagtttaacctgttgggagtcccacttgtaggtgcagatgtttgtggcttcctggggaacacctcagaagaattgtgcgtaagatggactcaactgggcgccttctacccttttatgcgcaatcacaactcactgacatctttgcctcaagaaccgtactcatttagtgagccagcacagcaggccatgaggaaggctcttggcctgagatatgcacttctgccgcatctgtacacccttttccaccaggctcatgtccatggagagactgttgcacgacctctgttcttggagttcccaaaagactcttccacgtggacagtcgatcaccagatgctgtggggcgaggctctgctgattacacctgtattgcaacctggtaaggccgaagttaccgggtactttccattggggacctggtatgatctgcaaacagtcccggttgaagctcttggaagtcttccacctccacctgctgcaccaagggagcctgcgatccactctgaaggacagtgggtaactttgcctgcaccgctggacaccatcaatgtccatctgcgcgaaggctacatcataccacttcaaggtcctggactgaccactacagagtctagaaaacaaccaatggctcttgctgttgcactgactaaaagcggcgaagcaaggggtgagctgttctgggacgacggagagtcactggaggtactcgaacgaggcgcgtatacgcaggtcatttttgaggctcgcaataatacgatcgttaacgagctggtccacgtcacttcagaaggtgcaggccttcagttgggcaaggtaactgtcctgggagttgctacagcaccgcagcaggtcttgtccaacggacggcccgtaagcaactttacctatagtcctgataccaaagttctggacatctgcgtttatctgctgatgggtgagcagttcctggtatcatggtgc

SEQ ID NO: 606 - protein, 944 aa, synthetic construct
  REGION 1..944: note = Variant of the Homo Sapiens Lysosomal alpha-glucosidase
MEWSWVFLFFLSVTTGVHSGHILWHDFSTVPRELSGSSQVLEETHPAHQVGASRPGPRDAQLHPGRPRAVPTQCDVPENSRFDCAPEKAITQEQCEARGCCYIPAKQGLQGAQMGQPWCFFPPSYPSYKLENLSQSEMGYTATLTRTTPSFFPKDILTLRLDVMMETENRLHFTIKDPANRRYEVPLETPHVHSRAPSPLYSVEFSEEPFGVIVRRQLDGRVLLNTTVAPLFFADQFLQLSTSLPSQYITGLAEHLSPLMLSTSWNKITLWNRDLAPTPGANLYGSHPFYLALEDGGSAHGVFLLNSNAMDVVLQPSPALSWRSTGGILDVYIFLGPEPKSVVQQYLDVVGYPFMPPYWGLGFHLCRWGYSSTAITRQVVENMTRAHFPLDVQWNDLDYMDSRRDFTFNKDGFRDFPAMVQELHQGGRRYMMIVDPGISSSGPAGSYRPYDEGLRRGVFITNETGQPLIGKVWPGSTAFPDFTNPEALAWWEDMVAEFHDQVPFDGMWIDMNEPSNFIRGSVDGCPNNELENPPYVPGVVGGTLQAATICASSHQFLSTHYNLHNLYGTTEAIASHRALVKARGTRPFVISRSTFAGHGRYAGHWTGDVWSSWEQLASSVPEILQFNLLGVPLVGADVCGFLGNTSEELCVRWTQLGAFYPFMRNHNSLTSLPQEPYSFSEPAQQAMRKALGLRYALLPHLYTLFHQAHVHGETVARPLFLEFPKDSSTWTVDHQMLWGEALLITPVLQPGKAEVTGYFPLGTWYDLQTVPVEALGSLPPPPAAPREPAIHSEGQWVTLPAPLDTINVHLREGYIIPLQGPGLTTTESRKQPMALAVALTKSGEARGELFWDDGESLEVLERGAYTQVIFEARNNTIVNELVHVTSEGAGLQLGKVTVLGVATAPQQVLSNGRPVSNFTYSPDTKVLDICVYLLMGEQFLVSWC

SEQ ID NO: 607 - DNA, 2832 bp, synthetic construct
  misc_feature 1..2832: note = Variant of the Homo Sapiens Lysosomal alpha-glucosidase
  source 1..2832: mol_type = other DNA
atggaatggagctgggtctttctcttcttcctgtcagtaacgactggtgtccactccggacacattctgtggcatgatttttctgtggtgcctagagagctttccggttcaagtcaagtcctcgaagaaacacatccagcccatcaggttggcgcatctaggccgggccctcgggacgctcaactccacccagggagacctagggccgttcccactcagtgcgacgtgccagagaactcacgcttcgattgtgcacctgagaaggctatcacgcaagagcagtgcgaggcccgcggatgttgttacataccggctaaacaggggctgcagggtgcgcagatgggccaaccttggtgcttcttcccaccatcctatccgagttacaagctggagaatctctcccagtctgaaatgggatataccgcaacactgactcggaccaccccctccttctttcccaaagatatcttgactctgagacttgacgtaatgatggagacagaaaacaggctccactttaccattaaggaccctgccaatcgccgatacgaggtgcctctggaaacaccacacgtgcacagtagagctccatcacctctgtattctgtcgagttctccgaagagccgtttggcgttatcgtcaggaggcagctcgacgggcgagtgcttctgaacacgactgtggccccgttgttctttgcggatcagtttctgcaactgtcaacaagtctcccttctcagtacattaccgggcttgcagagcatctgtccccactcatgctgagtacttcatggaacaaaatcacactgtggaatagagaccttgctcctactccaggagccaacttgtatggttctcaccctttctacttggccctggaagatggcggatcagcgcatggcgtattcctcctgaattccaacgcaatggacgttgttcttcagccatctcctgctttgagttggagatctacaggcgggatactggacgtctacatctttctgggtccagagcctaaatccgtagtgcagcagtatcttgatgtcgtcggatacccgtttatgccaccatattggggcctggggttccacttgtgccgctggggatattcatccaccgccattacacgacaagttgttgagaatatgaccagggcacattttcctctggatgtacagtggaacgacctggactacatggatagtcgccgcgacttcaccttcaataaggatgggttcagagactttcctgctatggtccaagaacttcaccagggaggcaggaggtacatgatgatcgtagatccgggaatttcttcttctggcccagccggttcatacagaccgtatgacgaaggactgcgacgaggcgtctttatcacgaacgagactggtcagcctttgataggcaaggtttggccagggtccaccgctttcccggatttcacaaatcctgaggcactggcctggtgggaagatatggtcgccgagtttcacgaccaggtcccatttgacgggatgtggatcgacatgaacgagccatccaacttcattagaggaagtgtggatggctgtccgaataatgagctggaaaaccctccttacgtaccaggcgttgttggtgggactcttcaagctgcgacgatttgcgcatcctcccatcagttcctgtcaacccactataacttgcacaatctgtacgggacaacagaggctatcgccagtcatagggccctggtaaaagctagaggaacacgccctttcgttatctctcgctcaacttttgcaggccacggtaggtatgccggacattggaccggcgacgtctggagttcttgggaacagctggcttcctccgttccagagatattgcagtttaacctgttgggagtcccacttgtaggtgcagatgtttgtggcttcctggggaacacctcagaagaattgtgcgtaagatggactcaactgggcgccttctacccttttatgcgcaatcacaactcactgacatctttgcctcaagaaccgtactcatttagtgagccagcacagcaggccatgaggaaggctcttggcctgagatatgcacttctgccgcatctgtacacccttttccaccaggctcatgtccatggagagactgttgcacgacctctgttcttggagttcccaaaagactcttccacgtggacagtcgatcaccagatgctgtggggcgaggctctgctgattacacctgtattgcaacctggtaaggccgaagttaccgggtactttccattggggacctggtatgatctgcaaacagtcccggttgaagctcttggaagtcttccacctccacctgctgcaccaagggagcctgcgatccactctgaaggacagtgggtaactttgcctgcaccgctggacaccatcaatgtccatctgcgcgaaggctacatcataccacttcaaggtcctggactgaccactacagagtctagaaaacaaccaatggctcttgctgttgcactgactaaaagcggcgaagcaaggggtgagctgttctgggacgacggagagtcactggaggtactcgaacgaggcgcgtatacgcaggtcatttttgaggctcgcaataatacgatcgttaacgagctggtccacgtcacttcagaaggtgcaggccttcagttgggcaaggtaactgtcctgggagttgctacagcaccgcagcaggtcttgtccaacggacggcccgtaagcaactttacctatagtcctgataccaaagttctggacatctgcgttgctctgctgatgggtgagcagttcctggtatcatggtgc

SEQ ID NO: 608 - protein, 944 aa, synthetic construct
  REGION 1..944: note = Variant of the Homo Sapiens Lysosomal alpha-glucosidase
MEWSWVFLFFLSVTTGVHSGHILWHDFSVVPRELSGSSQVLEETHPAHQVGASRPGPRDAQLHPGRPRAVPTQCDVPENSRFDCAPEKAITQEQCEARGCCYIPAKQGLQGAQMGQPWCFFPPSYPSYKLENLSQSEMGYTATLTRTTPSFFPKDILTLRLDVMMETENRLHFTIKDPANRRYEVPLETPHVHSRAPSPLYSVEFSEEPFGVIVRRQLDGRVLLNTTVAPLFFADQFLQLSTSLPSQYITGLAEHLSPLMLSTSWNKITLWNRDLAPTPGANLYGSHPFYLALEDGGSAHGVFLLNSNAMDVVLQPSPALSWRSTGGILDVYIFLGPEPKSVVQQYLDVVGYPFMPPYWGLGFHLCRWGYSSTAITRQVVENMTRAHFPLDVQWNDLDYMDSRRDFTFNKDGFRDFPAMVQELHQGGRRYMMIVDPGISSSGPAGSYRPYDEGLRRGVFITNETGQPLIGKVWPGSTAFPDFTNPEALAWWEDMVAEFHDQVPFDGMWIDMNEPSNFIRGSVDGCPNNELENPPYVPGVVGGTLQAATICASSHQFLSTHYNLHNLYGTTEAIASHRALVKARGTRPFVISRSTFAGHGRYAGHWTGDVWSSWEQLASSVPEILQFNLLGVPLVGADVCGFLGNTSEELCVRWTQLGAFYPFMRNHNSLTSLPQEPYSFSEPAQQAMRKALGLRYALLPHLYTLFHQAHVHGETVARPLFLEFPKDSSTWTVDHQMLWGEALLITPVLQPGKAEVTGYFPLGTWYDLQTVPVEALGSLPPPPAAPREPAIHSEGQWVTLPAPLDTINVHLREGYIIPLQGPGLTTTESRKQPMALAVALTKSGEARGELFWDDGESLEVLERGAYTQVIFEARNNTIVNELVHVTSEGAGLQLGKVTVLGVATAPQQVLSNGRPVSNFTYSPDTKVLDICVALLMGEQFLVSWC

SEQ ID NO: 609 - DNA, 2832 bp, synthetic construct
  misc_feature 1..2832: note = Variant of the Homo Sapiens Lysosomal alpha-glucosidase
  source 1..2832: mol_type = other DNA
atggaatggagctgggtctttctcttcttcctgtcagtaacgactggtgtccactccggacacattctgtggcatgatttttctaccgtgcctagagagctttccggttcaagtcaagtcctcgaagaaacacatccagcccatcagcagggcgcatctaggccgggccctcgggacgctcaactccacccagggagacctagggccgttcccactcagtgcgacgtgccagagaactcacgcttcgattgtgcacctgagaaggctatcacgcaagagcagtgcgaggcccgcggatgttgttacataccggctaaacaggggctgcagggtgcgcagatgggccaaccttggtgcttcttcccaccatcctatccgagttacaagctggagaatctctcccagtctgaaatgggatataccgcaacactgactcggaccaccccctccttctttcccaaagatatcttgactctgagacttgacgtaatgatggagacagaaaacaggctccactttaccattaaggaccctgccaatcgccgatacgaggtgcctctggaaacaccacacgtgcacagtagagctccatcacctctgtattctgtcgagttctccgaagagccgtttggcgttatcgtcaggaggcagctcgacgggcgagtgcttctgaacacgactgtggccccgttgttctttgcggatcagtttctgcaactgtcaacaagtctcccttctcagtacattaccgggcttgcagagcatctgtccccactcatgctgagtacttcatggaacaaaatcacactgtggaatagagaccttgctcctactccaggagccaacttgtatggttctcaccctttctacttggccctggaagatggcggatcagcgcatggcgtattcctcctgaattccaacgcaatggacgttgttcttcagccatctcctgctttgagttggagatctacaggcgggatactggacgtctacatctttctgggtccagagcctaaatccgtagtgcagcagtatcttgatgtcgtcggatacccgtttatgccaccatattggggcctggggttccacttgtgccgctggggatattcatccaccgccattacacgacaagttgttgagaatatgaccagggcacattttcctctggatgtacagtggaacgacctggactacatggatagtcgccgcgacttcaccttcaataaggatgggttcagagactttcctgctatggtccaagaacttcaccagggaggcaggaggtacatgatgatcgtagatccgggaatttcttcttctggcccagccggttcatacagaccgtatgacgaaggactgcgacgaggcgtctttatcacgaacgagactggtcagcctttgataggcaaggtttggccagggtccaccgctttcccggatttcacaaatcctgaggcactggcctggtgggaagatatggtcgccgagtttcacgaccaggtcccatttgacgggatgtggatcgacatgaacgagccatccaacttcattagaggaagtgtggatggctgtccgaataatgagctggaaaaccctccttacgtaccaggcgttgttggtgggactcttcaagctgcgacgatttgcgcatcctcccatcagttcctgtcaacccactataacttgcacaatctgtacgggacaacagaggctatcgccagtcatagggccctggtaaaagctagaggaacacgccctttcgttatctctcgctcaacttttgcaggccacggtaggtatgccggacattggaccggcgacgtctggagttcttgggaacagctggcttcctccgttccagagatattgcagtttaacctgttgggagtcccacttgtaggtgcagatgtttgtggcttcctggggaacacctcagaagaattgtgcgtaagatggactcaactgggcgccttctacccttttatgcgcaatcacaactcactgacatctttgcctcaagaaccgtactcatttagtgagccagcacagcaggccatgaggaaggctcttggcctgagatatgcacttctgccgcatctgtacacccttttccaccaggctcatgtccatggagagactgttgcacgacctctgttcttggagttcccaaaagactcttccacgtggacagtcgatcaccagatgctgtggggcgaggctctgctgattacacctgtattgcaacctggtaaggccgaagttaccgggtactttccattggggacctggtatgatctgcaaacagtcccggttgaagctcttggaagtcttccacctccacctgctgcaccaagggagcctgcgatccactctgaaggacagtgggtaactttgcctgcaccgctggacaccatcaatgtccatctgcgcgaaggctacatcataccacttcaaggtcctggactgaccactacagagtctagaaaacaaccaatggctcttgctgttgcactgactaaaagcggcgaagcaaggggtgagctgttctgggacgacggagagtcactggaggtactcgaacgaggcgcgtatacgcaggtcatttttgaggctcgcaataatacgatcgttaacgagctggtccacgtcacttcagaaggtgcaggccttcagttgggcaaggtaactgtcctgggagttgctacagcaccgcagcaggtcttgtccaacggacggcccgtaagcaactttacctatagtcctgataccaaagttctggacatctgcgttgctctgctgatgggtgagcagttcctggtatcatggtgc

SEQ ID NO: 610 - protein, 944 aa, synthetic construct
  REGION 1..944: note = Variant of the Homo Sapiens Lysosomal alpha-glucosidase
MEWSWVFLFFLSVTTGVHSGHILWHDFSTVPRELSGSSQVLEETHPAHQQGASRPGPRDAQLHPGRPRAVPTQCDVPENSRFDCAPEKAITQEQCEARGCCYIPAKQGLQGAQMGQPWCFFPPSYPSYKLENLSQSEMGYTATLTRTTPSFFPKDILTLRLDVMMETENRLHFTIKDPANRRYEVPLETPHVHSRAPSPLYSVEFSEEPFGVIVRRQLDGRVLLNTTVAPLFFADQFLQLSTSLPSQYITGLAEHLSPLMLSTSWNKITLWNRDLAPTPGANLYGSHPFYLALEDGGSAHGVFLLNSNAMDVVLQPSPALSWRSTGGILDVYIFLGPEPKSVVQQYLDVVGYPFMPPYWGLGFHLCRWGYSSTAITRQVVENMTRAHFPLDVQWNDLDYMDSRRDFTFNKDGFRDFPAMVQELHQGGRRYMMIVDPGISSSGPAGSYRPYDEGLRRGVFITNETGQPLIGKVWPGSTAFPDFTNPEALAWWEDMVAEFHDQVPFDGMWIDMNEPSNFIRGSVDGCPNNELENPPYVPGVVGGTLQAATICASSHQFLSTHYNLHNLYGTTEAIASHRALVKARGTRPFVISRSTFAGHGRYAGHWTGDVWSSWEQLASSVPEILQFNLLGVPLVGADVCGFLGNTSEELCVRWTQLGAFYPFMRNHNSLTSLPQEPYSFSEPAQQAMRKALGLRYALLPHLYTLFHQAHVHGETVARPLFLEFPKDSSTWTVDHQMLWGEALLITPVLQPGKAEVTGYFPLGTWYDLQTVPVEALGSLPPPPAAPREPAIHSEGQWVTLPAPLDTINVHLREGYIIPLQGPGLTTTESRKQPMALAVALTKSGEARGELFWDDGESLEVLERGAYTQVIFEARNNTIVNELVHVTSEGAGLQLGKVTVLGVATAPQQVLSNGRPVSNFTYSPDTKVLDICVALLMGEQFLVSWC

SEQ ID NO: 611 - DNA, 2832 bp, synthetic construct
  misc_feature 1..2832: note = Variant of the Homo Sapiens Lysosomal alpha-glucosidase
  source 1..2832: mol_type = other DNA
atggaatggagctgggtctttctcttcttcctgtcagtaacgactggtgtccactccggacacattctgtggcatgatttttctaccgtgcctagagagctttccggttcaagtcaagtcctcgaagaaacacatccagcccatcaggttggcgcatctaggccgggccctcgggacgctcaactccacccagggagacctagggccgttcccactcagtgcgacgtgccagagaactcacgcttcgattgtgcacctgagaaggctatcacgcaagagcagtgcgaggcccgcggatgttgttacataccggctaaacaggggctgcagggtgcgcagatgggccaaccttggtgcttcttcccaccatcctatccgagttacaagctggagaatctctcccagtctgaaatgggatataccgcaacactgactcggaccaccccctccttctttcccaaagatatcttgactctgagacttgacgtaatgatggagacagaaaacaggctccactttaccattaaggaccctgccaatcgccgatacgaggtgcctctggaaacaccacacgtgcacagtagagctccatcacctctgtattctgtcgagttctccgaagagccgtttggcgttatcgtcaggaggcagctcgacgggcgagtgcttctgaacacgactgtggccccgttgttctttgcggatcagtttctgcaactgtcaacaagtctcccttctcagtacattaccgggcttgcagagcatctgtccccactcatgctgagtacttcatggaacaaaatcacactgtggaatagagaccttgctcctactccaggagccaacttgtatggttctcaccctttctacttggccctggaagatggcggatcagcgcatggcgtattcctcctgaattccaacgcaatggacgttgttcttcagccatctcctgctttgagttggagatctacaggcgggatactggacgtctacatctttctgggtccagagcctaaatccgtagtgcagcagtatcttgatgtcgtcggatacccgtttatgccaccatattggggcctggggttccacttgtgccgctggggatattcatccaccgccattacacgacaagttgttgagaatatgaccagggcacattttcctctggatgtacagtggaacgacctggactacatggatagtcgccgcgacttcaccttcaataaggatgggttcagagactttcctgctatggtccaagaacttcaccagggaggcaggaggtacatgatgatcgtagatccgggaatttcttcttctggcccagccggttcatacagaccgtatgacgaaggactgcgacgaggcgtctttatcacgaacgagactggtcagcctttgataggcaaggtttggccagggtccaccgctttcccggatttcacaaatcctgaggcactggcctggtgggaagatatggtcgccgagtttcacgaccaggtcccatttgacgggatgtggatcgacatgaacgagccatccaacttcattagaggaagtgtggatggctgtccgaataatgagctggaaaaccctccttacgtaccaggcgttgttggtgggactcttcaagctgcgacgatttgcgcatcctcccatcagttcctgtcaacccactataacttgcacaatctgtacgggacaacagaggctatcgccagtcatagggccctggtaaaagctagaggaacacgccctttcgttatctctcgctcaacttttgcaggccacggtaggtatgccggacattggaccggcgacgtctggagttcttgggaacagctggcttcctccgttccagagatattgcagtttaacctgttgggagtcccacttgtaggtgcagatgtttgtggcttcctggggaacacctcagaagaattgtgcgtaagatggactcaactgggcgccttctacccttttatgcgcaatcacaactcactgacatctttgcctcaagaaccgtactcatttagtgagccagcacagcaggccatgaggaaggctcttggcctgagatatgcacttctgccgcatctgtacacccttttccaccaggctcatgtccatggagagactgttgcacgacctctgttcttggagttcccaaaagactcttccacgtggacagtcgatcaccagatgctgtggggcgaggctctgctgattacacctgtattgcaacctggtaaggccgaagttaccgggtactttccattggggacctggtatgatctgcaaacagtcccggttgaagctcttggaagtcttccacctccacctgctgcaccaagggagcctgcgatccactctgaaggacagtgggtaactttgcctgcaccgctggacaccatcaatgtccatctgcgcgaaggctacatcataccacttcaaggtcctggactgaccactacagagtctagaaaacaaccaatggctcttgctgttgcactgactaaactcggcgaagcaaggggtgagctgttctgggacgacggagagtcactggaggtactcgaacgaggcgcgtatacgcaggtcatttttgaggctcgcaataatacgatcgttaacgagctggtccacgtcacttcagaaggtgcaggccttcagttgggcaaggtaactgtcctgggagttgctacagcaccgcagcaggtcttgtccaacggacggcccgtaagcaactttacctatagtcctgataccaaagttctggacatctgcgttgctctgctgatgggtgagcagttcctggtatcatggtgc

SEQ ID NO: 612 - protein, 944 aa, synthetic construct
  REGION 1..944: note = Variant of the Homo Sapiens Lysosomal alpha-glucosidase
MEWSWVFLFFLSVTTGVHSGHILWHDFSTVPRELSGSSQVLEETHPAHQVGASRPGPRDAQLHPGRPRAVPTQCDVPENSRFDCAPEKAITQEQCEARGCCYIPAKQGLQGAQMGQPWCFFPPSYPSYKLENLSQSEMGYTATLTRTTPSFFPKDILTLRLDVMMETENRLHFTIKDPANRRYEVPLETPHVHSRAPSPLYSVEFSEEPFGVIVRRQLDGRVLLNTTVAPLFFADQFLQLSTSLPSQYITGLAEHLSPLMLSTSWNKITLWNRDLAPTPGANLYGSHPFYLALEDGGSAHGVFLLNSNAMDVVLQPSPALSWRSTGGILDVYIFLGPEPKSVVQQYLDVVGYPFMPPYWGLGFHLCRWGYSSTAITRQVVENMTRAHFPLDVQWNDLDYMDSRRDFTFNKDGFRDFPAMVQELHQGGRRYMMIVDPGISSSGPAGSYRPYDEGLRRGVFITNETGQPLIGKVWPGSTAFPDFTNPEALAWWEDMVAEFHDQVPFDGMWIDMNEPSNFIRGSVDGCPNNELENPPYVPGVVGGTLQAATICASSHQFLSTHYNLHNLYGTTEAIASHRALVKARGTRPFVISRSTFAGHGRYAGHWTGDVWSSWEQLASSVPEILQFNLLGVPLVGADVCGFLGNTSEELCVRWTQLGAFYPFMRNHNSLTSLPQEPYSFSEPAQQAMRKALGLRYALLPHLYTLFHQAHVHGETVARPLFLEFPKDSSTWTVDHQMLWGEALLITPVLQPGKAEVTGYFPLGTWYDLQTVPVEALGSLPPPPAAPREPAIHSEGQWVTLPAPLDTINVHLREGYIIPLQGPGLTTTESRKQPMALAVALTKLGEARGELFWDDGESLEVLERGAYTQVIFEARNNTIVNELVHVTSEGAGLQLGKVTVLGVATAPQQVLSNGRPVSNFTYSPDTKVLDICVALLMGEQFLVSWC

SEQ ID NO: 613 - DNA, 2832 bp, synthetic construct
  misc_feature 1..2832: note = Variant of the Homo Sapiens Lysosomal alpha-glucosidase
  source 1..2832: mol_type = other DNA
atggaatggagctgggtctttctcttcttcctgtcagtaacgactggtgtccactccggacacattctgtggcatgatttttctaccgtgcctagagagctttccggttcaagtcaagtcctcgaagaaacacatccagcccatcaggttggcgcatctaggccgggccctcgggacgctcaactccacccagggagacctagggccgttcccactcagtgcgacgtgccagagaactcacgcttcgattgtgcacctgagaaggctatcacgcaagagcagtgcgaggcccgcggatgttgttacataccggctaaacaggggctgcagggtgcgcagatgggccaaccttggtgcttcttcccaccatcctatccgagttacaagctggagaatctctcccagtctgaaatgggatataccgcaacactgactcggaccaccccctccttctttcccaaagatatcttgactctgagacttgacgtaatgatggagacagaaaacaggctccactttaccattaaggaccctgccaatcgccgatacgaggtgcctctggaaacaccacacgtgcacagtagagctccatcacctctgtattctgtcgagttctccgaagagccgtttggcgttatcgtcaggaggcagctcgacgggcgagtgcttctgaacacgactgtggccccgttgttctttgcggatcagtttctgcaactgtcaacaagtctcccttctcagtacattaccgggcttgcagagcatctgtccccactcatgctgagtacttcatggaacaaaatcacactgtggaatagagaccttgctcctactccaggagccaacttgtatggttctcaccctttctacttggccctggaagatggcggatcagcgcatggcgtattcctcctgaattccaacgcaatggacgttgttcttcagccatctcctgctttgagttggagatctacaggcgggatactggacgtctacatctttctgggtccagagcctaaatccgtagtgcagcagtatcttgatgtcgtcggatacccgtttatgccaccatattggggcctggggttccacttgtgccgctggggatattcatccaccgccattacacgacaagttgttgagaatatgaccagggcacattttcctctggatgtacagtggaacgacctggactacatggatagtcgccgcgacttcaccttcaataaggatgggttcagagactttcctgctatggtccaagaacttcaccagggaggcaggaggtacatgatgatcgtagatccgggaatttcttcttctggcccagccggttcatacagaccgtatgacgaaggactgcgacgaggcgtctttatcacgaacgagactggtcagcctttgataggcaaggtttggccagggtccaccgctttcccggatttcacaaatcctgaggcactggcctggtgggaagatatggtcgccgagtttcacgaccaggtcccatttgacgggatgtggatcgacatgaacgagccatccaacttcattagaggaagtgtggatggctgtccgaataatgagctggaaaaccctccttacgtaccaggcgttgttggtgggactcttcaagctgcgacgatttgcgcatcctcccatcagttcctgtcaacccactataacttgcacaatctgtacgggacaacagaggctatcgccagtcatagggccctggtaaaagctagaggaacacgccctttcgttatctctcgctcaacttttgcaggccacggtaggtatgccggacattggaccggcgacgtctggagttcttgggaacagctggcttcctccgttccagagatattgcagtttaacctgttgggagtcccacttgtaggtgcagatgtttgtggcttcctggggaacacctcagaagaattgtgcgtaagatggactcaactgggcgccttctacccttttatgcgcaatcacaactcactgacatctttgcctcaagaaccgtactcatttagtgagccagcacagcaggccatgaggaaggctctttttctgagatatgcacttctgccgcatctgtacacccttttccaccaggctcatgtccatggagagactgttgcacgacctctgttcttggagttcccaaaagactcttccacgtggacagtcgatcaccagatgctgtggggcgaggctctgctgattacacctgtattgcaacctggtaaggccgaagttaccgggtactttccattggggacctggtatgatctgcaaacagtcccggttgaagctcttggaagtcttccacctccacctgctgcaccaagggagcctgcgatccactctgaaggacagtgggtaactttgcctgcaccgctggacaccatcaatgtccatctgcgcgaaggctacatcataccacttcaaggtcctggactgaccactacagagtctagaaaacaaccaatggctcttgctgttgcactgactaaaagcggcgaagcaaggggtgagctgttctgggacgacggagagtcactggaggtactcgaacgaggcgcgtatacgcaggtcatttttgaggctcgcaataatacgatcgttaacgagctggtccacgtcacttcagaaggtgcaggccttcagttgggcaaggtaactgtcctgggagttgctacagcaccgcagcaggtcttgtccaacggacggcccgtaagcaactttacctatagtcctgataccaaagttctggacatctgcgttgctctgctgatgggtgagcagttcctggtatcatggtgc

SEQ ID NO: 614 - protein, 944 aa, synthetic construct
  REGION 1..944: note = Variant of the Homo Sapiens Lysosomal alpha-glucosidase
MEWSWVFLFFLSVTTGVHSGHILWHDFSTVPRELSGSSQVLEETHPAHQVGASRPGPRDAQLHPGRPRAVPTQCDVPENSRFDCAPEKAITQEQCEARGCCYIPAKQGLQGAQMGQPWCFFPPSYPSYKLENLSQSEMGYTATLTRTTPSFFPKDILTLRLDVMMETENRLHFTIKDPANRRYEVPLETPHVHSRAPSPLYSVEFSEEPFGVIVRRQLDGRVLLNTTVAPLFFADQFLQLSTSLPSQYITGLAEHLSPLMLSTSWNKITLWNRDLAPTPGANLYGSHPFYLALEDGGSAHGVFLLNSNAMDVVLQPSPALSWRSTGGILDVYIFLGPEPKSVVQQYLDVVGYPFMPPYWGLGFHLCRWGYSSTAITRQVVENMTRAHFPLDVQWNDLDYMDSRRDFTFNKDGFRDFPAMVQELHQGGRRYMMIVDPGISSSGPAGSYRPYDEGLRRGVFITNETGQPLIGKVWPGSTAFPDFTNPEALAWWEDMVAEFHDQVPFDGMWIDMNEPSNFIRGSVDGCPNNELENPPYVPGVVGGTLQAATICASSHQFLSTHYNLHNLYGTTEAIASHRALVKARGTRPFVISRSTFAGHGRYAGHWTGDVWSSWEQLASSVPEILQFNLLGVPLVGADVCGFLGNTSEELCVRWTQLGAFYPFMRNHNSLTSLPQEPYSFSEPAQQAMRKALFLRYALLPHLYTLFHQAHVHGETVARPLFLEFPKDSSTWTVDHQMLWGEALLITPVLQPGKAEVTGYFPLGTWYDLQTVPVEALGSLPPPPAAPREPAIHSEGQWVTLPAPLDTINVHLREGYIIPLQGPGLTTTESRKQPMALAVALTKSGEARGELFWDDGESLEVLERGAYTQVIFEARNNTIVNELVHVTSEGAGLQLGKVTVLGVATAPQQVLSNGRPVSNFTYSPDTKVLDICVALLMGEQFLVSWC

SEQ ID NO: 615 - DNA, 2832 bp, synthetic construct
  misc_feature 1..2832: note = Variant of the Homo Sapiens Lysosomal alpha-glucosidase
  source 1..2832: mol_type = other DNA
atggaatggagctgggtctttctcttcttcctgtcagtaacgactggtgtccactccggacacattctgtggcatgatttttctcgcgtgcctagagagctttccggttcaagtcaagtcctcgaagaaacacatccagcccatcaggttggcgcatctaggccgggccctcgggacgctcaactccacccagggagacctagggccgttcccactcagtgcgacgtgccagagaactcacgcttcgattgtgcacctgagaaggctatcacgcaagagcagtgcgaggcccgcggatgttgttacataccggctaaacaggggctgcagggtgcgcagatgggccaaccttggtgcttcttcccaccatcctatccgagttacaagctggagaatctctcccagtctgaaatgggatataccgcaacactgactcggaccaccccctccttctttcccaaagatatcttgactctgagacttgacgtaatgatggagacagaaaacaggctccactttaccattaaggaccctgccaatcgccgatacgaggtgcctctggaaacaccacacgtgcacagtagagctccatcacctctgtattctgtcgagttctccgaagagccgtttggcgttatcgtcaggaggcagctcgacgggcgagtgcttctgaacacgactgtggccccgttgttctttgcggatcagtttctgcaactgtcaacaagtctcccttctcagtacattaccgggcttgcagagcatctgtccccactcatgctgagtacttcatggaacaaaatcacactgtggaatagagaccttgctcctactccaggagccaacttgtatggttctcaccctttctacttggccctggaagatggcggatcagcgcatggcgtattcctcctgaattccaacgcaatggacgttgttcttcagccatctcctgctttgagttggagatctacaggcgggatactggacgtctacatctttctgggtccagagcctaaatccgtagtgcagcagtatcttgatgtcgtcggatacccgtttatgccaccatattggggcctggggttccacttgtgccgctggggatattcatccaccgccattacacgacaagttgttgagaatatgaccagggcacattttcctctggatgtacagtggaacgacctggactacatggatagtcgccgcgacttcaccttcaataaggatgggttcagagactttcctgctatggtccaagaacttcaccagggaggcaggaggtacatgatgatcgtagatccgggaatttcttcttctggcccagccggttcatacagaccgtatgacgaaggactgcgacgaggcgtctttatcacgaacgagactggtcagcctttgataggcaaggtttggccagggtccaccgctttcccggatttcacaaatcctgaggcactggcctggtgggaagatatggtcgccgagtttcacgaccaggtcccatttgacgggatgtggatcgacatgaacgagccatccaacttcattagaggaagtgtggatggctgtccgaataatgagctggaaaaccctccttacgtaccaggcgttgttggtgggactcttcaagctgcgacgatttgcgcatcctcccatcagttcctgtcaacccactataacttgcacaatctgtacgggacaacagaggctatcgccagtcatagggccctggtaaaagctagaggaacacgccctttcgttatctctcgctcaacttttgcaggccacggtaggtatgccggacattggaccggcgacgtctggagttcttgggaacagctggcttcctccgttccagagatattgcagtttaacctgttgggagtcccacttgtaggtgcagatgtttgtggcttcctggggaacacctcagaagaattgtgcgtaagatggactcaactgggcgccttctacccttttatgcgcaatcacaactcactgacatctttgcctcaagaaccgtactcatttagtgagccagcacagcaggccatgaggaaggctcttggcctgagatatgcacttctgccgcatctgtacacccttttccaccaggctcatgtccatggagagactgttgcacgacctctgttcttggagttcccaaaagactcttccacgtggacagtcgatcaccagatgctgtggggcgaggctctgctgattacacctgtattgcaacctggtaaggccgaagttaccgggtactttccattggggacctggtatgatctgcaaacagtcccggttgaagctcttggaagtcttccacctccacctgctgcaccaagggagcctgcgatccactctgaaggacagtgggtaactttgcctgcaccgctggacaccatcaatgtccatctgcgcgaaggctacatcataccacttcaaggtcctggactgaccactacagagtctagaaaacaaccaatggctcttgctgttgcactgactaaaagcggcgaagcaaggggtgagctgttctgggacgacggagagtcactggaggtactcgaacgaggcgcgtatacgcaggtcatttttgaggctcgcaataatacgatcgttaacgagctggtccacgtcacttcagaaggtgcaggccttcagttgggcaaggtaactgtcctgggagttgctacagcaccgcagcaggtcttgtccaacggacggcccgtaagcaactttacctatagtcctgataccaaagttctggacatctgcgttgctctgctgatgggtgagcagttcctggtatcatggtgc

SEQ ID NO: 616 - protein, 944 aa, synthetic construct
  REGION 1..944: note = Variant of the Homo Sapiens Lysosomal alpha-glucosidase
MEWSWVFLFFLSVTTGVHSGHILWHDFSRVPRELSGSSQVLEETHPAHQVGASRPGPRDAQLHPGRPRAVPTQCDVPENSRFDCAPEKAITQEQCEARGCCYIPAKQGLQGAQMGQPWCFFPPSYPSYKLENLSQSEMGYTATLTRTTPSFFPKDILTLRLDVMMETENRLHFTIKDPANRRYEVPLETPHVHSRAPSPLYSVEFSEEPFGVIVRRQLDGRVLLNTTVAPLFFADQFLQLSTSLPSQYITGLAEHLSPLMLSTSWNKITLWNRDLAPTPGANLYGSHPFYLALEDGGSAHGVFLLNSNAMDVVLQPSPALSWRSTGGILDVYIFLGPEPKSVVQQYLDVVGYPFMPPYWGLGFHLCRWGYSSTAITRQVVENMTRAHFPLDVQWNDLDYMDSRRDFTFNKDGFRDFPAMVQELHQGGRRYMMIVDPGISSSGPAGSYRPYDEGLRRGVFITNETGQPLIGKVWPGSTAFPDFTNPEALAWWEDMVAEFHDQVPFDGMWIDMNEPSNFIRGSVDGCPNNELENPPYVPGVVGGTLQAATICASSHQFLSTHYNLHNLYGTTEAIASHRALVKARGTRPFVISRSTFAGHGRYAGHWTGDVWSSWEQLASSVPEILQFNLLGVPLVGADVCGFLGNTSEELCVRWTQLGAFYPFMRNHNSLTSLPQEPYSFSEPAQQAMRKALGLRYALLPHLYTLFHQAHVHGETVARPLFLEFPKDSSTWTVDHQMLWGEALLITPVLQPGKAEVTGYFPLGTWYDLQTVPVEALGSLPPPPAAPREPAIHSEGQWVTLPAPLDTINVHLREGYIIPLQGPGLTTTESRKQPMALAVALTKSGEARGELFWDDGESLEVLERGAYTQVIFEARNNTIVNELVHVTSEGAGLQLGKVTVLGVATAPQQVLSNGRPVSNFTYSPDTKVLDICVALLMGEQFLVSWC

SEQ ID NO: 617 - DNA, 2832 bp, synthetic construct
  misc_feature 1..2832: note = Variant of the Homo Sapiens Lysosomal alpha-glucosidase
  source 1..2832: mol_type = other DNA
atggaatggagctgggtctttctcttcttcctgtcagtaacgactggtgtccactccggacacattctgtggcatgatttttctaccgtgcctagagagctttccggttcaagtcaagtcctcgaagaaacacatccagcccatcaggttggcgcatctaggccgggccctcgggacgctcaactccacccagggagacctagggccgttcccactcagtgcgacgtgccagagaactcacgcttcgattgtgcacctgagaaggctatcacgcaagagcagtgcgaggcccgcggatgttgttacataccggctaaacaggggctgcagggtgcgcagatgggccaaccttggtgcttcttcccaccatcctatccgagttacaagctggagaatctctcccagtctgaaatgggatataccgcaacactgactcggaccaccccctccttctttcccaaagatatcttgactctgagacttgacgtaatgatggagacagaaaacaggctccactttaccattaaggaccctgccaatcgccgatacgaggtgcctctggaaacaccacacgtgcacagtagagctccatcacctctgtattctgtcgagttctccgaagagccgtttggcgttatcgtcaggaggcagctcgacgggcgagtgcttctgaacacgactgtggccccgttgttctttgcggatcagtttctgcaactgtcaacaagtctcccttctcagtacattaccgggcttgcagagcatctgtccccactcatgctgagtacttcatggaacaaaatcacactgtggaatagagaccttgctcctactccaggagccaacttgtatggttctcaccctttctacttggccctggaagatggcggatcagcgcatggcgtattcctcctgaattccaacgcaatggacgttgttcttcagccatctcctgctttgagttggagatctacaggcgggatactggacgtctacatctttctgggtccagagcctaaatccgtagtgcagcagtatcttgatgtcgtcggatacccgtttatgccaccatattggggcctggggttccacttgtgccgctggggatattcatccaccgccattacacgacaagttgttgagaatatgaccagggcacattttcctctggatgtacagtggaacgacctggactacatggatagtcgccgcgacttcaccttcaataaggatgggttcagagactttcctgctatggtccaagaacttcaccagggaggcaggaggtacatgatgatcgtagatccgggaatttcttcttctggcccagccggttcatacagaccgtatgacgaaggactgcgacgaggcgtctttatcacgaacgagactggtcagcctttgataggcaaggtttggccagggtccaccgctttcccggatttcacaaatcctgaggcactggcctggtgggaagatatggtcgccgagtttcacgaccaggtcccatttgacgggatgtggatcgacatgaacgagccatccaacttcattagaggaagtgtggatggctgtccgaataatgagctggaaaaccctccttacgtaccaggcgttgttggtgggactcttcaagctgcgacgatttgcgcatcctcccatcagttcctgtcaacccactataacttgcacaatctgtacgggacaacagaggctatcgccagtcatagggccctggtaaaagctagaggaacacgccctttcgttatctctcgctcaacttttgcaggccacggtaggtatgccggacattggaccggcgacgtctggagttcttgggaacagctggcttcctccgttccagagatattgcagtttaacctgttgggagtcccacttgtaggtgcagatgtttgtggcttcctggggaacacctcagaagaattgtgcgtaagatggactcaactgggcgccttctacccttttatgcgcaatcacaactcactgacatctttgcctcaagaaccgtactcatttagtgagccagcacagcaggccatgaggaaggctcttggcctgagatatgcacttctgccgcatctgtacacccttttccaccaggctcatgtccatggagagactgttgcacgacctctgttcttggagttcccaaaagactcttccacgtggacagtcgatcaccagatgctgtggggcgaggctctgctgattacacctgtattgcaacctggtaaggccgaagttaccgggtactttccattggggacctggtatgatctgcaaacagtcccggttgaagctcttggaagtcttccacctccacctgctgcaccaagggagcctgcgatccactctgaaggacagtgggtaactttgcctgcaccgctggacaccatcaatgtccatctgcgcgaaggctacatcataccacttcaaggtcctggactgaccactacagagtctagaaaacaaccaatggctcttgctgttgcactgactaaaagcggcgaagcaaggggtgagctgttctgggacgacggagagtcactggaggtactcgaacgaggcgcgtatacgcaggtcatttttgaggctcgcaataatacgatcgttaacgagctggtccacgtcacttcagaaggtgcaggccttcagttgatcaaggtaactgtcctgggagttgctacagcaccgcagcaggtcttgtccaacggacggcccgtaagcaactttacctatagtcctgataccaaagttctggacatctgcgttgctctgctgatgggtgagcagttcctggtatcatggtgc

SEQ ID NO: 618 - protein, 944 aa, synthetic construct
  REGION 1..944: note = Variant of the Homo Sapiens Lysosomal alpha-glucosidase
MEWSWVFLFFLSVTTGVHSGHILWHDFSTVPRELSGSSQVLEETHPAHQVGASRPGPRDAQLHPGRPRAVPTQCDVPENSRFDCAPEKAITQEQCEARGCCYIPAKQGLQGAQMGQPWCFFPPSYPSYKLENLSQSEMGYTATLTRTTPSFFPKDILTLRLDVMMETENRLHFTIKDPANRRYEVPLETPHVHSRAPSPLYSVEFSEEPFGVIVRRQLDGRVLLNTTVAPLFFADQFLQLSTSLPSQYITGLAEHLSPLMLSTSWNKITLWNRDLAPTPGANLYGSHPFYLALEDGGSAHGVFLLNSNAMDVVLQPSPALSWRSTGGILDVYIFLGPEPKSVVQQYLDVVGYPFMPPYWGLGFHLCRWGYSSTAITRQVVENMTRAHFPLDVQWNDLDYMDSRRDFTFNKDGFRDFPAMVQELHQGGRRYMMIVDPGISSSGPAGSYRPYDEGLRRGVFITNETGQPLIGKVWPGSTAFPDFTNPEALAWWEDMVAEFHDQVPFDGMWIDMNEPSNFIRGSVDGCPNNELENPPYVPGVVGGTLQAATICASSHQFLSTHYNLHNLYGTTEAIASHRALVKARGTRPFVISRSTFAGHGRYAGHWTGDVWSSWEQLASSVPEILQFNLLGVPLVGADVCGFLGNTSEELCVRWTQLGAFYPFMRNHNSLTSLPQEPYSFSEPAQQAMRKALGLRYALLPHLYTLFHQAHVHGETVARPLFLEFPKDSSTWTVDHQMLWGEALLITPVLQPGKAEVTGYFPLGTWYDLQTVPVEALGSLPPPPAAPREPAIHSEGQWVTLPAPLDTINVHLREGYIIPLQGPGLTTTESRKQPMALAVALTKSGEARGELFWDDGESLEVLERGAYTQVIFEARNNTIVNELVHVTSEGAGLQLIKVTVLGVATAPQQVLSNGRPVSNFTYSPDTKVLDICVALLMGEQFLVSWC

SEQ ID NO: 619 - DNA, 2832 bp, synthetic construct
  misc_feature 1..2832: note = Variant of the Homo Sapiens Lysosomal alpha-glucosidase
  source 1..2832: mol_type = other DNA
atggaatggagctgggtctttctcttcttcctgtcagtaacgactggtgtccactccggacacattctgtggcatgatttttctaccgtgcctagagagctttccggttcaagtaatgtcctcgaagaaacacatccagcccatcaggttggcgcatctaggccgggccctcgggacgctcaactccacccagggagacctagggccgttcccactcagtgcgacgtgccagagaactcacgcttcgattgtgcacctgagaaggctatcacgcaagagcagtgcgaggcccgcggatgttgttacataccggctaaacaggggctgcagggtgcgcagatgggccaaccttggtgcttcttcccaccatcctatccgagttacaagctggagaatctctcccagtctgaaatgggatataccgcaacactgactcggaccaccccctccttctttcccaaagatatcttgactctgagacttgacgtaatgatggagacagaaaacaggctccactttaccattaaggaccctgccaatcgccgatacgaggtgcctctggaaacaccacacgtgcacagtagagctccatcacctctgtattctgtcgagttctccgaagagccgtttggcgttatcgtcaggaggcagctcgacgggcgagtgcttctgaacacgactgtggccccgttgttctttgcggatcagtttctgcaactgtcaacaagtctcccttctcagtacattaccgggcttgcagagcatctgtccccactcatgctgagtacttcatggaacaaaatcacactgtggaatagagaccttgctcctactccaggagccaacttgtatggttctcaccctttctacttggccctggaagatggcggatcagcgcatggcgtattcctcctgaattccaacgcaatggacgttgttcttcagccatctcctgctttgagttggagatctacaggcgggatactggacgtctacatctttctgggtccagagcctaaatccgtagtgcagcagtatcttgatgtcgtcggatacccgtttatgccaccatattggggcctggggttccacttgtgccgctggggatattcatccaccgccattacacgacaagttgttgagaatatgaccagggcacattttcctctggatgtacagtggaacgacctggactacatggatagtcgccgcgacttcaccttcaataaggatgggttcagagactttcctgctatggtccaagaacttcaccagggaggcaggaggtacatgatgatcgtagatccgggaatttcttcttctggcccagccggttcatacagaccgtatgacgaaggactgcgacgaggcgtctttatcacgaacgagactggtcagcctttgataggcaaggtttggccagggtccaccgctttcccggatttcacaaatcctgaggcactggcctggtgggaagatatggtcgccgagtttcacgaccaggtcccatttgacgggatgtggatcgacatgaacgagccatccaacttcattagaggaagtgtggatggctgtccgaataatgagctggaaaaccctccttacgtaccaggcgttgttggtgggactcttcaagctgcgacgatttgcgcatcctcccatcagttcctgtcaacccactataacttgcacaatctgtacgggacaacagaggctatcgccagtcatagggccctggtaaaagctagaggaacacgccctttcgttatctctcgctcaacttttgcaggccacggtaggtatgccggacattggaccggcgacgtctggagttcttgggaacagctggcttcctccgttccagagatattgcagtttaacctgttgggagtcccacttgtaggtgcagatgtttgtggcttcctggggaacacctcagaagaattgtgcgtaagatggactcaactgggcgccttctacccttttatgcgcaatcacaactcactgacatctttgcctcaagaaccgtactcatttagtgagccagcacagcaggccatgaggaaggctcttggcctgagatatgcacttctgccgcatctgtacacccttttccaccaggctcatgtccatggagagactgttgcacgacctctgttcttggagttcccaaaagactcttccacgtggacagtcgatcaccagatgctgtggggcgaggctctgctgattacacctgtattgcaacctggtaaggccgaagttaccgggtactttccattggggacctggtatgatctgcaaacagtcccggttgaagctcttggaagtcttccacctccacctgctgcaccaagggagcctgcgatccactctgaaggacagtgggtaactttgcctgcaccgctggacaccatcaatgtccatctgcgcgaaggctacatcataccacttcaaggtcctggactgaccactacagagtctagaaaacaaccaatggctcttgctgttgcactgactaaaagcggcgaagcaaggggtgagctgttctgggacgacggagagtcactggaggtactcgaacgaggcgcgtatacgcaggtcatttttgaggctcgcaataatacgatcgttaacgagctggtccacgtcacttcagaaggtgcaggccttcagttgggcaaggtaactgtcctgggagttgctacagcaccgcagcaggtcttgtccaacggacggcccgtaagcaactttacctatagtcctgataccaaagttctggacatctgcgttgctctgctgatgggtgagcagttcctggtatcatggtgc

SEQ ID NO: 620 - protein, 944 aa, synthetic construct
  REGION 1..944: note = Variant of the Homo Sapiens Lysosomal alpha-glucosidase
MEWSWVFLFFLSVTTGVHSGHILWHDFSTVPRELSGSSNVLEETHPAHQVGASRPGPRDAQLHPGRPRAVPTQCDVPENSRFDCAPEKAITQEQCEARGCCYIPAKQGLQGAQMGQPWCFFPPSYPSYKLENLSQSEMGYTATLTRTTPSFFPKDILTLRLDVMMETENRLHFTIKDPANRRYEVPLETPHVHSRAPSPLYSVEFSEEPFGVIVRRQLDGRVLLNTTVAPLFFADQFLQLSTSLPSQYITGLAEHLSPLMLSTSWNKITLWNRDLAPTPGANLYGSHPFYLALEDGGSAHGVFLLNSNAMDVVLQPSPALSWRSTGGILDVYIFLGPEPKSVVQQYLDVVGYPFMPPYWGLGFHLCRWGYSSTAITRQVVENMTRAHFPLDVQWNDLDYMDSRRDFTFNKDGFRDFPAMVQELHQGGRRYMMIVDPGISSSGPAGSYRPYDEGLRRGVFITNETGQPLIGKVWPGSTAFPDFTNPEALAWWEDMVAEFHDQVPFDGMWIDMNEPSNFIRGSVDGCPNNELENPPYVPGVVGGTLQAATICASSHQFLSTHYNLHNLYGTTEAIASHRALVKARGTRPFVISRSTFAGHGRYAGHWTGDVWSSWEQLASSVPEILQFNLLGVPLVGADVCGFLGNTSEELCVRWTQLGAFYPFMRNHNSLTSLPQEPYSFSEPAQQAMRKALGLRYALLPHLYTLFHQAHVHGETVARPLFLEFPKDSSTWTVDHQMLWGEALLITPVLQPGKAEVTGYFPLGTWYDLQTVPVEALGSLPPPPAAPREPAIHSEGQWVTLPAPLDTINVHLREGYIIPLQGPGLTTTESRKQPMALAVALTKSGEARGELFWDDGESLEVLERGAYTQVIFEARNNTIVNELVHVTSEGAGLQLGKVTVLGVATAPQQVLSNGRPVSNFTYSPDTKVLDICVALLMGEQFLVSWC

SEQ ID NO: 621 - DNA, 2832 bp, synthetic construct
  misc_feature 1..2832: note = Variant of the Homo Sapiens Lysosomal alpha-glucosidase
  source 1..2832: mol_type = other DNA
atggaatggagctgggtctttctcttcttcctgtcagtaacgactggtgtccactccggacacattctgtggcatgatttttctaccgtgcctagagagctttccggttcaagtcaagtcctcgaagaaacacatccagcccatcaggttggcgcatctaggccgggccctcgggacgctcaactccacccagggagacctagggccgttcccactcagtgcgacgtgccagagaactcacgcttcgattgtgcacctgagaaggctatcacgcaagagcagtgcgaggcccgcggatgttgttacataccggctaaacaggggctgcagggtgcgcagatgggccaaccttggtgcttcttcccaccatcctatccgagttacaagctggagaatctctcccagtctgaaatgggatataccgcaacactgactcggaccaccccctccttctttcccaaagatatcttgactctgagacttgacgtaatgatggagacagaaaacaggctccactttaccattaaggaccctgccaatcgccgatacgaggtgcctctggaaacaccacacgtgcacagtagagctccatcacctctgtattctgtcgagttctccgaagagccgtttggcgttatcgtcaggaggcagctcgacgggcgagtgcttctgaacacgactgtggccccgttgttctttgcggatcagtttctgcaactgtcaacaagtctcccttctcagtacattaccgggcttgcagagcatctgtccccactcatgctgagtacttcatggaacaaaatcacactgtggaatagagaccttgctcctactccaggagccaacttgtatggttctcaccctttctacttggccctggaagatggcggatcagcgcatggcgtattcctcctgaattccaacgcaatggacgttgttcttcagccatctcctgctttgagttggagatctacaggcgggatactggacgtctacatctttctgggtccagagcctaaatccgtagtgcagcagtatcttgatgtcgtcggatacccgtttatgccaccatattggggcctggggttccacttgtgccgctggggatattcatccaccgccattacacgacaagttgttgagaatatgaccagggcacattttcctctggatgtacagtggaacgacctggactacatggatagtcgccgcgacttcaccttcaataaggatgggttcagagactttcctgctatggtccaagaacttcaccagggaggcaggaggtacatgatgatcgtagatccgggaatttcttcttctggcccagccggttcatacagaccgtatgacgaaggactgcgacgaggcgtctttatcacgaacgagactggtcagcctttgataggcaaggtttggccagggtccaccgctttcccggatttcacaaatcctgaggcactggcctggtgggaagatatggtcgccgagtttcacgaccaggtcccatttgacgggatgtggatcgacatgaacgagccatccaacttcattagaggaagtgtggatggctgtccgaataatgagctggaaaaccctccttacgtaccaggcgttgttggtgggactcttcaagctgcgacgatttgcgcatcctcccatcagttcctgtcaacccactataacttgcacaatctgtacgggacaacagaggctatcgccagtcatagggccctggtaaaagctagaggaacacgccctttcgttatctctcgctcaacttttgcaggccacggtaggtatgccggacattggaccggcgacgtctggagttcttgggaacagctggcttcctccgttccagagatattgcagtttaacctgttgggagtcccacttgtaggtgcagatgtttgtggcttcctggggaacacctcagaagaattgtgcgtaagatggactcaactgggcgccttctacccttttatgcgcaatcacaactcactgacatctttgcctcaagaaccgtactcatttagtgagccagcacagcaggccatgaggaaggctcttacactgagatatgcacttctgccgcatctgtacacccttttccaccaggctcatgtccatggagagactgttgcacgacctctgttcttggagttcccaaaagactcttccacgtggacagtcgatcaccagatgctgtggggcgaggctctgctgattacacctgtattgcaacctggtaaggccgaagttaccgggtactttccattggggacctggtatgatctgcaaacagtcccggttgaagctcttggaagtcttccacctccacctgctgcaccaagggagcctgcgatccactctgaaggacagtgggtaactttgcctgcaccgctggacaccatcaatgtccatctgcgcgaaggctacatcataccacttcaaggtcctggactgaccactacagagtctagaaaacaaccaatggctcttgctgttgcactgactaaaagcggcgaagcaaggggtgagctgttctgggacgacggagagtcactggaggtactcgaacgaggcgcgtatacgcaggtcatttttgaggctcgcaataatacgatcgttaacgagctggtccacgtcacttcagaaggtgcaggccttcagttgggcaaggtaactgtcctgggagttgctacagcaccgcagcaggtcttgtccaacggacggcccgtaagcaactttacctatagtcctgataccaaagttctggacatctgcgttgctctgctgatgggtgagcagttcctggtatcatggtgc

SEQ ID NO: 622 - protein, 944 aa, synthetic construct
  REGION 1..944: note = Variant of the Homo Sapiens Lysosomal alpha-glucosidase
MEWSWVFLFFLSVTTGVHSGHILWHDFSTVPRELSGSSQVLEETHPAHQVGASRPGPRDAQLHPGRPRAVPTQCDVPENSRFDCAPEKAITQEQCEARGCCYIPAKQGLQGAQMGQPWCFFPPSYPSYKLENLSQSEMGYTATLTRTTPSFFPKDILTLRLDVMMETENRLHFTIKDPANRRYEVPLETPHVHSRAPSPLYSVEFSEEPFGVIVRRQLDGRVLLNTTVAPLFFADQFLQLSTSLPSQYITGLAEHLSPLMLSTSWNKITLWNRDLAPTPGANLYGSHPFYLALEDGGSAHGVFLLNSNAMDVVLQPSPALSWRSTGGILDVYIFLGPEPKSVVQQYLDVVGYPFMPPYWGLGFHLCRWGYSSTAITRQVVENMTRAHFPLDVQWNDLDYMDSRRDFTFNKDGFRDFPAMVQELHQGGRRYMMIVDPGISSSGPAGSYRPYDEGLRRGVFITNETGQPLIGKVWPGSTAFPDFTNPEALAWWEDMVAEFHDQVPFDGMWIDMNEPSNFIRGSVDGCPNNELENPPYVPGVVGGTLQAATICASSHQFLSTHYNLHNLYGTTEAIASHRALVKARGTRPFVISRSTFAGHGRYAGHWTGDVWSSWEQLASSVPEILQFNLLGVPLVGADVCGFLGNTSEELCVRWTQLGAFYPFMRNHNSLTSLPQEPYSFSEPAQQAMRKALTLRYALLPHLYTLFHQAHVHGETVARPLFLEFPKDSSTWTVDHQMLWGEALLITPVLQPGKAEVTGYFPLGTWYDLQTVPVEALGSLPPPPAAPREPAIHSEGQWVTLPAPLDTINVHLREGYIIPLQGPGLTTTESRKQPMALAVALTKSGEARGELFWDDGESLEVLERGAYTQVIFEARNNTIVNELVHVTSEGAGLQLGKVTVLGVATAPQQVLSNGRPVSNFTYSPDTKVLDICVALLMGEQFLVSWC

SEQ ID NO: 623 - DNA, 2832 bp, synthetic construct
  misc_feature 1..2832: note = Variant of the Homo Sapiens Lysosomal alpha-glucosidase
  source 1..2832: mol_type = other DNA
atggaatggagctgggtctttctcttcttcctgtcagtaacgactggtgtccactccggacacattctgtggcatgatttttctaccgtgcctagagagctttccggttcaagtcaagtcctcgaagaaacacatccagcccatcaggttggcgcatctaggccgggccctcgggacgctcaactccacccagggagacctagggccgttcccactcagtgcgacgtgccagagaactcacgcttcgattgtgcacctgagaaggctatcacgcaagagcagtgcgaggcccgcggatgttgttacataccggctaaacaggggctgcagggtgcgcagatgggccaaccttggtgcttcttcccaccatcctatccgagttacaagctggagaatctctcccagtctgaaatgggatataccgcaacactgactcggaccaccccctccttctttcccaaagatatcttgactctgagacttgacgtaatgatggagacagaaaacaggctccactttaccattaaggaccctgccaatcgccgatacgaggtgcctctggaaacaccacacgtgcacagtagagctccatcacctctgtattctgtcgagttctccgaagagccgtttggcgttatcgtcaggaggcagctcgacgggcgagtgcttctgaacacgactgtggccccgttgttctttgcggatcagtttctgcaactgtcaacaagtctcccttctcagtacattaccgggcttgcagagcatctgtccccactcatgctgagtacttcatgggagaaaatcacactgtggaatagagaccttgctcctactccaggagccaacttgtatggttctcaccctttctacttggccctggaagatggcggatcagcgcatggcgtattcctcctgaattccaacgcaatggacgttgttcttcagccatctcctgctttgagttggagatctacaggcgggatactggacgtctacatctttctgggtccagagcctaaatccgtagtgcagcagtatcttgatgtcgtcggatacccgtttatgccaccatattggggcctggggttccacttgtgccgctggggatattcatccaccgccattacacgacaagttgttgagaatatgaccagggcacattttcctctggatgtacagtggaacgacctggactacatggatagtcgccgcgacttcaccttcaataaggatgggttcagagactttcctgctatggtccaagaacttcaccagggaggcaggaggtacatgatgatcgtagatccgggaatttcttcttctggcccagccggttcatacagaccgtatgacgaaggactgcgacgaggcgtctttatcacgaacgagactggtcagcctttgataggcaaggtttggccagggtccaccgctttcccggatttcacaaatcctgaggcactggcctggtgggaagatatggtcgccgagtttcacgaccaggtcccatttgacgggatgtggatcgacatgaacgagccatccaacttcattagaggaagtgtggatggctgtccgaataatgagctggaaaaccctccttacgtaccaggcgttgttggtgggactcttcaagctgcgacgatttgcgcatcctcccatcagttcctgtcaacccactataacttgcacaatctgtacgggacaacagaggctatcgccagtcatagggccctggtaaaagctagaggaacacgccctttcgttatctctcgctcaacttttgcaggccacggtaggtatgccggacattggaccggcgacgtctggagttcttgggaacagctggcttcctccgttccagagatattgcagtttaacctgttgggagtcccacttgtaggtgcagatgtttgtggcttcctggggaacacctcagaagaattgtgcgtaagatggactcaactgggcgccttctacccttttatgcgcaatcacaactcactgacatctttgcctcaagaaccgtactcatttagtgagccagcacagcaggccatgaggaaggctcttggcctgagatatgcacttctgccgcatctgtacacccttttccaccaggctcatgtccatggagagactgttgcacgacctctgttcttggagttcccaaaagactcttccacgtggacagtcgatcaccagatgctgtggggcgaggctctgctgattacacctgtattgcaacctggtaaggccgaagttaccgggtactttccattggggacctggtatgatctgcaaacagtcccggttgaagctcttggaagtcttccacctccacctgctgcaccaagggagcctgcgatccactctgaaggacagtgggtaactttgcctgcaccgctggacaccatcaatgtccatctgcgcgaaggctacatcataccacttcaaggtcctggactgaccactacagagtctagaaaacaaccaatggctcttgctgttgcactgactaaaagcggcgaagcaaggggtgagctgttctgggacgacggagagtcactggaggtactcgaacgaggcgcgtatacgcaggtcatttttgaggctcgcaataatacgatcgttaacgagctggtccacgtcacttcagaaggtgcaggccttcagttgggcaaggtaactgtcctgggagttgctacagcaccgcagcaggtcttgtccaacggacggcccgtaagcaactttacctatagtcctgataccaaagttctggacatctgcgttgctctgctgatgggtgagcagttcctggtatcatggtgc

SEQ ID NO: 624 - protein, 944 aa, synthetic construct
  REGION 1..944: note = Variant of the Homo Sapiens Lysosomal alpha-glucosidase
MEWSWVFLFFLSVTTGVHSGHILWHDFSTVPRELSGSSQVLEETHPAHQVGASRPGPRDAQLHPGRPRAVPTQCDVPENSRFDCAPEKAITQEQCEARGCCYIPAKQGLQGAQMGQPWCFFPPSYPSYKLENLSQSEMGYTATLTRTTPSFFPKDILTLRLDVMMETENRLHFTIKDPANRRYEVPLETPHVHSRAPSPLYSVEFSEEPFGVIVRRQLDGRVLLNTTVAPLFFADQFLQLSTSLPSQYITGLAEHLSPLMLSTSWEKITLWNRDLAPTPGANLYGSHPFYLALEDGGSAHGVFLLNSNAMDVVLQPSPALSWRSTGGILDVYIFLGPEPKSVVQQYLDVVGYPFMPPYWGLGFHLCRWGYSSTAITRQVVENMTRAHFPLDVQWNDLDYMDSRRDFTFNKDGFRDFPAMVQELHQGGRRYMMIVDPGISSSGPAGSYRPYDEGLRRGVFITNETGQPLIGKVWPGSTAFPDFTNPEALAWWEDMVAEFHDQVPFDGMWIDMNEPSNFIRGSVDGCPNNELENPPYVPGVVGGTLQAATICASSHQFLSTHYNLHNLYGTTEAIASHRALVKARGTRPFVISRSTFAGHGRYAGHWTGDVWSSWEQLASSVPEILQFNLLGVPLVGADVCGFLGNTSEELCVRWTQLGAFYPFMRNHNSLTSLPQEPYSFSEPAQQAMRKALGLRYALLPHLYTLFHQAHVHGETVARPLFLEFPKDSSTWTVDHQMLWGEALLITPVLQPGKAEVTGYFPLGTWYDLQTVPVEALGSLPPPPAAPREPAIHSEGQWVTLPAPLDTINVHLREGYIIPLQGPGLTTTESRKQPMALAVALTKSGEARGELFWDDGESLEVLERGAYTQVIFEARNNTIVNELVHVTSEGAGLQLGKVTVLGVATAPQQVLSNGRPVSNFTYSPDTKVLDICVALLMGEQFLVSWC

SEQ ID NO: 625 - DNA, 2832 bp, synthetic construct
  misc_feature 1..2832: note = Variant of the Homo Sapiens Lysosomal alpha-glucosidase
  source 1..2832: mol_type = other DNA
atggaatggagctgggtctttctcttcttcctgtcagtaacgactggtgtccactccggacacattctgtggcatgatttttctaccgtgcctagagagctttccggttcaagtcaagtcctcgaagaaacacatccagcccatcaggttggcgcatctaggccgggccctcgggacgctcaactccacccagggagacctagggccgttcccactcagtgcgacgtgccatgtaactcacgcttcgattgtgcacctgagaaggctatcacgcaagagcagtgcgaggcccgcggatgttgttacataccggctaaacaggggctgcagggtgcgcagatgggccaaccttggtgcttcttcccaccatcctatccgagttacaagctggagaatctctcccagtctgaaatgggatataccgcaacactgactcggaccaccccctccttctttcccaaagatatcttgactctgagacttgacgtaatgatggagacagaaaacaggctccactttaccattaaggaccctgccaatcgccgatacgaggtgcctctggaaacaccacacgtgcacagtagagctccatcacctctgtattctgtcgagttctccgaagagccgtttggcgttatcgtcaggaggcagctcgacgggcgagtgcttctgaacacgactgtggccccgttgttctttgcggatcagtttctgcaactgtcaacaagtctcccttctcagtacattaccgggcttgcagagcatctgtccccactcatgctgagtacttcatggaacaaaatcacactgtggaatagagaccttgctcctactccaggagccaacttgtatggttctcaccctttctacttggccctggaagatggcggatcagcgcatggcgtattcctcctgaattccaacgcaatggacgttgttcttcagccatctcctgctttgagttggagatctacaggcgggatactggacgtctacatctttctgggtccagagcctaaatccgtagtgcagcagtatcttgatgtcgtcggatacccgtttatgccaccatattggggcctggggttccacttgtgccgctggggatattcatccaccgccattacacgacaagttgttgagaatatgaccagggcacattttcctctggatgtacagtggaacgacctggactacatggatagtcgccgcgacttcaccttcaataaggatgggttcagagactttcctgctatggtccaagaacttcaccagggaggcaggaggtacatgatgatcgtagatccgggaatttcttcttctggcccagccggttcatacagaccgtatgacgaaggactgcgacgaggcgtctttatcacgaacgagactggtcagcctttgataggcaaggtttggccagggtccaccgctttcccggatttcacaaatcctgaggcactggcctggtgggaagatatggtcgccgagtttcacgaccaggtcccatttgacgggatgtggatcgacatgaacgagccatccaacttcattagaggaagtgtggatggctgtccgaataatgagctggaaaaccctccttacgtaccaggcgttgttggtgggactcttcaagctgcgacgatttgcgcatcctcccatcagttcctgtcaacccactataacttgcacaatctgtacgggacaacagaggctatcgccagtcatagggccctggtaaaagctagaggaacacgccctttcgttatctctcgctcaacttttgcaggccacggtaggtatgccggacattggaccggcgacgtctggagttcttgggaacagctggcttcctccgttccagagatattgcagtttaacctgttgggagtcccacttgtaggtgcagatgtttgtggcttcctggggaacacctcagaagaattgtgcgtaagatggactcaactgggcgccttctacccttttatgcgcaatcacaactcactgacatctttgcctcaagaaccgtactcatttagtgagccagcacagcaggccatgaggaaggctcttggcctgagatatgcacttctgccgcatctgtacacccttttccaccaggctcatgtccatggagagactgttgcacgacctctgttcttggagttcccaaaagactcttccacgtggacagtcgatcaccagatgctgtggggcgaggctctgctgattacacctgtattgcaacctggtaaggccgaagttaccgggtactttccattggggacctggtatgatctgcaaacagtcccggttgaagctcttggaagtcttccacctccacctgctgcaccaagggagcctgcgatccactctgaaggacagtgggtaactttgcctgcaccgctggacaccatcaatgtccatctgcgcgaaggctacatcataccacttcaaggtcctggactgaccactacagagtctagaaaacaaccaatggctcttgctgttgcactgactaaaagcggcgaagcaaggggtgagctgttctgggacgacggagagtcactggaggtactcgaacgaggcgcgtatacgcaggtcatttttgaggctcgcaataatacgatcgttaacgagctggtccacgtcacttcagaaggtgcaggccttcagttgggcaaggtaactgtcctgggagttgctacagcaccgcagcaggtcttgtccaacggacggcccgtaagcaactttacctatagtcctgataccaaagttctggacatctgcgttgctctgctgatgggtgagcagttcctggtatcatggtgc

SEQ ID NO: 626 - protein, 944 aa, synthetic construct
  REGION 1..944: note = Variant of the Homo Sapiens Lysosomal alpha-glucosidase
MEWSWVFLFFLSVTTGVHSGHILWHDFSTVPRELSGSSQVLEETHPAHQVGASRPGPRDAQLHPGRPRAVPTQCDVPCNSRFDCAPEKAITQEQCEARGCCYIPAKQGLQGAQMGQPWCFFPPSYPSYKLENLSQSEMGYTATLTRTTPSFFPKDILTLRLDVMMETENRLHFTIKDPANRRYEVPLETPHVHSRAPSPLYSVEFSEEPFGVIVRRQLDGRVLLNTTVAPLFFADQFLQLSTSLPSQYITGLAEHLSPLMLSTSWNKITLWNRDLAPTPGANLYGSHPFYLALEDGGSAHGVFLLNSNAMDVVLQPSPALSWRSTGGILDVYIFLGPEPKSVVQQYLDVVGYPFMPPYWGLGFHLCRWGYSSTAITRQVVENMTRAHFPLDVQWNDLDYMDSRRDFTFNKDGFRDFPAMVQELHQGGRRYMMIVDPGISSSGPAGSYRPYDEGLRRGVFITNETGQPLIGKVWPGSTAFPDFTNPEALAWWEDMVAEFHDQVPFDGMWIDMNEPSNFIRGSVDGCPNNELENPPYVPGVVGGTLQAATICASSHQFLSTHYNLHNLYGTTEAIASHRALVKARGTRPFVISRSTFAGHGRYAGHWTGDVWSSWEQLASSVPEILQFNLLGVPLVGADVCGFLGNTSEELCVRWTQLGAFYPFMRNHNSLTSLPQEPYSFSEPAQQAMRKALGLRYALLPHLYTLFHQAHVHGETVARPLFLEFPKDSSTWTVDHQMLWGEALLITPVLQPGKAEVTGYFPLGTWYDLQTVPVEALGSLPPPPAAPREPAIHSEGQWVTLPAPLDTINVHLREGYIIPLQGPGLTTTESRKQPMALAVALTKSGEARGELFWDDGESLEVLERGAYTQVIFEARNNTIVNELVHVTSEGAGLQLGKVTVLGVATAPQQVLSNGRPVSNFTYSPDTKVLDICVALLMGEQFLVSWC

SEQ ID NO: 627 - DNA, 2832 bp, synthetic construct
  misc_feature 1..2832: note = Variant of the Homo Sapiens Lysosomal alpha-glucosidase
  source 1..2832: mol_type = other DNA
atggaatggagctgggtctttctcttcttcctgtcagtaacgactggtgtccactccggacacattctgtggcatgatttttctaccgtgcctagagagctttccggttcaagtcaagtcctcgaagaaacacatccagcccatcaggttggcgcatctaggccgggccctcgggacgctcaactccacccagggagacctagggccgttcccactcagtgcgacgtgccagagaactcacgcttcgattgtgcacctgagaaggctatcacgcaagagcagtgcgaggcccgcggatgttgttacataccggctaaacaggggctgcagggtgcgcagatgggccaaccttggtgcttcttcccaccatcctatccgagttacaagctggagaatctctcccagtctgaaatgggatataccgcaacactgactcggaccaccccctccttctttcccaaagatatcttgactctgagacttgacgtaatgatggagacagaaaacaggctccactttaccattaaggaccctgccaatcgccgatacgaggtgcctctggaaacaccacacgtgcacagtagagctccatcacctctgtattctgtcgagttctccgaagagccgtttggcgttatcgtcaggaggcagctcgacgggcgagtgcttctgaacacgactgtggccccgttgttctttgcggatcagtttctgcaactgtcaacaagtctcccttctcagtacattaccgggcttgcagagcatctgtccccactcatgctgagtacttcatggaacaaaatcacactgtggaatagagaccttgctcctactccaggagccaacttgtatggttctcaccctttctacttggccctggaagatggcggatcagcgcatggcgtattcctcctgaattccaacgcaatggacgttgttcttcagccatctcctgctttgagttggagatctacaggcgggatactggacgtctacatctttctgggtccagagcctaaatccgtagtgcagcagtatcttgatgtcgtcggatacccgtttatgccaccatattggggcctggggttccacttgtgccgctggggatattcatccaccgccattacacgacaagttgttgagaatatgaccagggcacattttcctctggatgtacagtggaacgacctggactacatggatagtcgccgcgacttcaccttcaataaggatgggttcagagactttcctgctatggtccaagaacttcaccagggaggcaggaggtacatgatgatcgtagatccgggaatttcttcttctggcccagccggttcatacagaccgtatgacgaaggactgcgacgaggcgtctttatcacgaacgagactggtcagcctttgataggcaaggtttggccagggtccaccgctttcccggatttcacaaatcctgaggcactggcctggtgggaagatatggtcgccgagtttcacgaccaggtcccatttgacgggatgtggatcgacatgaacgagccatccaacttcattagaggaagtgtggatggctgtccgaataatgagctggaaaaccctccttacgtaccaggcgttgttggtgggactcttcaagctgcgacgatttgcgcatcctcccatcagttcctgtcaacccactataacttgcacaatctgtacgggacaacagaggctatcgccagtcatagggccctggtaaaagctagaggaacacgccctttcgttatctctcgctcaacttttgcaggccacggtaggtatgccggacattggaccggcgacgtctggagttcttgggaacagctggcttcctccgttccagagatattgcagtttaacctgttgggagtcccacttgtaggtgcagatgtttgtggcttcctggggaacacctcagaagaattgtgcgtaagatggactcaactgggcgccttctacccttttatgcgcaatcacaactcactgacatctttgcctcaagaaccgtactcatttagtgagccagcacagcaggccatgaggaaggctcttggcctgagatatgcacttctgccgcatctgtacacccttttccaccaggctcatgtccatggagagactgttgcacgacctctgttcttggagttcccaaaagactcttccacgtggacagtcgatcaccagatgctgtggggcgaggctctgctgattacacctgtattgcaacctggtaaggccgaagttaccgggtactttccattggggacctggtatgatctgcaaacagtcccggttgaagctcttggaagtcttccacctccacctgctgcaccaagggagcctgcgatccactctgaaggacagtgggtaactttgcctgcaccgctggacaccatcaatgtccatctgcgcgaaggctacatcataccacttcaaggtcctggactgaccactacagagtctagaaaacaaccaatggctcttgctgttgcactgactaaaagcggcgaagcaaggggtgagctgttctgggacgacggagagtcactggaggtactcgaacgaggcgcgtatacgcaggtcatttttgaggctcgcaataatacgatcgttaacgagctggtccacgtcacttcagaaggtgcaggccttcagttgcaaaaggtaactgtcctgggagttgctacagcaccgcagcaggtcttgtccaacggacggcccgtaagcaactttacctatagtcctgataccaaagttctggacatctgcgttgctctgctgatgggtgagcagttcctggtatcatggtgc

SEQ ID NO: 628 - protein, 944 aa, synthetic construct
  REGION 1..944: note = Variant of the Homo Sapiens Lysosomal alpha-glucosidase
MEWSWVFLFFLSVTTGVHSGHILWHDFSTVPRELSGSSQVLEETHPAHQVGASRPGPRDAQLHPGRPRAVPTQCDVPENSRFDCAPEKAITQEQCEARGCCYIPAKQGLQGAQMGQPWCFFPPSYPSYKLENLSQSEMGYTATLTRTTPSFFPKDILTLRLDVMMETENRLHFTIKDPANRRYEVPLETPHVHSRAPSPLYSVEFSEEPFGVIVRRQLDGRVLLNTTVAPLFFADQFLQLSTSLPSQYITGLAEHLSPLMLSTSWNKITLWNRDLAPTPGANLYGSHPFYLALEDGGSAHGVFLLNSNAMDVVLQPSPALSWRSTGGILDVYIFLGPEPKSVVQQYLDVVGYPFMPPYWGLGFHLCRWGYSSTAITRQVVENMTRAHFPLDVQWNDLDYMDSRRDFTFNKDGFRDFPAMVQELHQGGRRYMMIVDPGISSSGPAGSYRPYDEGLRRGVFITNETGQPLIGKVWPGSTAFPDFTNPEALAWWEDMVAEFHDQVPFDGMWIDMNEPSNFIRGSVDGCPNNELENPPYVPGVVGGTLQAATICASSHQFLSTHYNLHNLYGTTEAIASHRALVKARGTRPFVISRSTFAGHGRYAGHWTGDVWSSWEQLASSVPEILQFNLLGVPLVGADVCGFLGNTSEELCVRWTQLGAFYPFMRNHNSLTSLPQEPYSFSEPAQQAMRKALGLRYALLPHLYTLFHQAHVHGETVARPLFLEFPKDSSTWTVDHQMLWGEALLITPVLQPGKAEVTGYFPLGTWYDLQTVPVEALGSLPPPPAAPREPAIHSEGQWVTLPAPLDTINVHLREGYIIPLQGPGLTTTESRKQPMALAVALTKSGEARGELFWDDGESLEVLERGAYTQVIFEARNNTIVNELVHVTSEGAGLQLQKVTVLGVATAPQQVLSNGRPVSNFTYSPDTKVLDICVALLMGEQFLVSWC

SEQ ID NO: 629 - DNA, 2832 bp, synthetic construct
  misc_feature 1..2832: note = Variant of the Homo Sapiens Lysosomal alpha-glucosidase
  source 1..2832: mol_type = other DNA
atggaatggagctgggtctttctcttcttcctgtcagtaacgactggtgtccactccggacacattctgtggcatgatttttctaccgtgcctagagagctttccggttcaagtcaagtcctcgaagaaacacatccagcccatcaggttggcgcatctaggccgggccctcgggacgctcaactccacccagggagacctagggccgttcccactcagtgcgacgtgccagagaactcacgcttcgattgtgcacctgagaaggctatcacgcaagagcagtgcgaggcccgcggatgttgttacataccggctaaacaggggctgcagggtgcgcagatgggccaaccttggtgcttcttcccaccatcctatccgagttacaagctggagaatctctcccagtctgaaatgggatataccgcaacactgactcggaccaccccctccttctttcccaaagatatcttgactctgagacttgacgtaatgatggagacagaaaacaggctccactttaccattaaggaccctgccaatcgccgatacgaggtgcctctggaaacaccacacgtgcacagtagagctccatcacctctgtattctgtcgagttctccgaagagccgtttggcgttatcgtcaggaggcagctcgacgggcgagtgcttctgaacacgactgtggccccgttgttctttgcggatcagtttctgcaactgtcaacaagtctcccttctcagtacattaccgggcttgcagagcatctgtccccactcatgctgagtacttcatggaacaaaatcacactgtggaatagagaccttgctcctactccaggagccaacttgtatggttctcaccctttctacttggccctggaagatggcggatcagcgcatggcgtattcctcctgaattccaacgcaatggacgttgttcttcagccatctcctgctttgagttggagatctacaggcgggatactggacgtctacatctttctgggtccagagcctaaatccgtagtgcagcagtatcttgatgtcgtcggatacccgtttatgccaccatattggggcctggggttccacttgtgccgctggggatattcatccaccgccattacacgacaagttgttgagaatatgaccagggcacattttcctctggatgtacagtggaacgacctggactacatggatagtcgccgcgacttcaccttcaataaggatgggttcagagactttcctgctatggtccaagaacttcaccagggaggcaggaggtacatgatgatcgtagatccgggaatttcttcttctggcccagccggttcatacagaccgtatgacgaaggactgcgacgaggcgtctttatcacgaacgagactggtcagcctttgataggcaaggtttggccagggtccaccgctttcccggatttcacaaatcctgaggcactggcctggtgggaagatatggtcgccgagtttcacgaccaggtcccatttgacgggatgtggatcgacatgaacgagccatccaacttcattagaggaagtgtggatggctgtccgaataatgagctggaaaaccctccttacgtaccaggcgttgttggtgggactcttcaagctgcgacgatttgcgcatcctcccatcagttcctgtcaacccactataacttgcacaatctgtacgggacaacagaggctatcgccagtcatagggccctggtaaaagctagaggaacacgccctttcgttatctctcgctcaacttttgcaggccacggtaggtatgccggacattggaccggcgacgtctggagttcttgggaacagctggcttcctccgttccagagatattgcagtttaacctgttgggagtcccacttgtaggtgcagatgtttgtggcttcctggggaacacctcagaagaattgtgcgtaagatggactcaactgggcgccttctacccttttatgcgcaatcacaactcactgacatctttgcctcaagaaccgtactcatttagtgagccagcacagcaggccatgaggaaggctcttggcctgagatatgcacttctgccgcatctgtacacccttttccaccaggctcatgtccatggagagactgttgcacgacctctgttcttggagttcccaaaagactcttccacgtggacagtcgatcaccagatgctgtggggcgaggctctgctgattacacctgtattgcaacctggtaaggccgaagttaccgggtactttccattggggacctggtatgatctgcaaacagtcccggttgaagctcttggaagtcttccacctccacctgctgcaccaagggagcctgcgatccactctgaaggacagtgggtaactttgcctgcaccgctggacaccatcaatgtccatctgcgcgaaggctacatcataccacttcaaggtcctggactgaccactacagagtctagaaaacaaccaatggctcttgctgttgcactgactaaaagcggcgaagcaaggggtgagctgttctgggacgacggagagtcactggaggtactcgaacgaggcgcgtatacgcaggtcatttttgaggctcgcaataatacgatcgttaacgagctggtccacgtcacttcagaaggtgcaggccttcagttgggcaaggtaactgtcctgggagttgctacagcaccgcagcaggtcttgtccaacggacggcccgtaagcaactttacctatagtcctgataccaaagttctggacatctgcgttccactgctgatgggtgagcagttcctggtatcatggtgc

SEQ ID NO: 630 - protein, 944 aa, synthetic construct
  REGION 1..944: note = Variant of the Homo Sapiens Lysosomal alpha-glucosidase
MEWSWVFLFFLSVTTGVHSGHILWHDFSTVPRELSGSSQVLEETHPAHQVGASRPGPRDAQLHPGRPRAVPTQCDVPENSRFDCAPEKAITQEQCEARGCCYIPAKQGLQGAQMGQPWCFFPPSYPSYKLENLSQSEMGYTATLTRTTPSFFPKDILTLRLDVMMETENRLHFTIKDPANRRYEVPLETPHVHSRAPSPLYSVEFSEEPFGVIVRRQLDGRVLLNTTVAPLFFADQFLQLSTSLPSQYITGLAEHLSPLMLSTSWNKITLWNRDLAPTPGANLYGSHPFYLALEDGGSAHGVFLLNSNAMDVVLQPSPALSWRSTGGILDVYIFLGPEPKSVVQQYLDVVGYPFMPPYWGLGFHLCRWGYSSTAITRQVVENMTRAHFPLDVQWNDLDYMDSRRDFTFNKDGFRDFPAMVQELHQGGRRYMMIVDPGISSSGPAGSYRPYDEGLRRGVFITNETGQPLIGKVWPGSTAFPDFTNPEALAWWEDMVAEFHDQVPFDGMWIDMNEPSNFIRGSVDGCPNNELENPPYVPGVVGGTLQAATICASSHQFLSTHYNLHNLYGTTEAIASHRALVKARGTRPFVISRSTFAGHGRYAGHWTGDVWSSWEQLASSVPEILQFNLLGVPLVGADVCGFLGNTSEELCVRWTQLGAFYPFMRNHNSLTSLPQEPYSFSEPAQQAMRKALGLRYALLPHLYTLFHQAHVHGETVARPLFLEFPKDSSTWTVDHQMLWGEALLITPVLQPGKAEVTGYFPLGTWYDLQTVPVEALGSLPPPPAAPREPAIHSEGQWVTLPAPLDTINVHLREGYIIPLQGPGLTTTESRKQPMALAVALTKSGEARGELFWDDGESLEVLERGAYTQVIFEARNNTIVNELVHVTSEGAGLQLGKVTVLGVATAPQQVLSNGRPVSNFTYSPDTKVLDICVPLLMGEQFLVSWC

SEQ ID NO: 631 - DNA, 2832 bp, synthetic construct
  misc_feature 1..2832: note = Variant of the Homo Sapiens Lysosomal alpha-glucosidase
  source 1..2832: mol_type = other DNA
atggaatggagctgggtctttctcttcttcctgtcagtaacgactggtgtccactccggacacattctgtggcatgatttttctaccgtgcctagagagctttccggttcaagtcaagtcctcgaagaaacacatccagcccatcaggttggcgcatctaggccgggccctcgggacgctcaactccacccagggagacctagggccgttcccactcagtgcgacgtgccagagaactcacgcttcgattgtgcacctgagaaggctatcacgcaagagcagtgcgaggcccgcggatgttgttacataccggctaaacaggggctgcagggtgcgcagatgggccaaccttggtgcttcttcccaccatcctatccgagttacaagctggagaatctctcccagtctgaaatgggatataccgcaacactgactcggaccaccccctccttctttcccaaagatatcttgactctgagacttgacgtaatgatggagacagaaaacaggctccactttaccattaaggaccctgccaatcgccgatacgaggtgcctctggaaacaccacacgtgcacagtagagctccatcacctctgtattctgtcgagttctccgaagagccgtttggcgttatcgtcaggaggcagctcgacgggcgagtgcttctgaacacgactgtggccccgttgttctttgcggatcagtttctgcaactgtcaacaagtctcccttctcagtacattaccgggcttgcagagcatctgtccccactcatgctgagtacttcatggaacaaaatcacactgtggaatagagaccttgctcctactccaggagccaacttgtatggttctcaccctttctacttggccctggaagatggcggatcagcgcatggcgtattcctcctgaattccaacgcaatggacgttgttcttcagccatctcctgctttgagttggagatctacaggcgggatactggacgtctacatctttctgggtccagagcctaaatccgtagtgcagcagtatcttgatgtcgtcggatacccgtttatgccaccatattggggcctggggttccacttgtgccgctggggatattcatccaccgccattacacgacaagttgttgagaatatgaccagggcacattttcctctggatgtacagtggaacgacctggactacatggatagtcgccgcgacttcaccttcaataaggatgggttcagagactttcctgctatggtccaagaacttcaccagggaggcaggaggtacatgatgatcgtagatccgggaatttcttcttctggcccagccggttcatacagaccgtatgacgaaggactgcgacgaggcgtctttatcacgaacgagactggtcagcctttgataggcaaggtttggccagggtccaccgctttcccggatttcacaaatcctgaggcactggcctggtgggaagatatggtcgccgagtttcacgaccaggtcccatttgacgggatgtggatcgacatgaacgagccatccaacttcattagaggaagtgtggatggctgtccgaataatgagctggaaaaccctccttacgtaccaggcgttgttggtgggactcttcaagctgcgacgatttgcgcatcctcccatcagttcctgtcaacccactataacttgcacaatctgtacgggacaacagaggctatcgccagtcatagggccctggtaaaagctagaggaacacgccctttcgttatctctcgctcaacttttgcaggccacggtaggtatgccggacattggaccggcgacgtctggagttcttgggaacagctggcttcctccgttccagagatattgcagtttaacctgttgggagtcccacttgtaggtgcagatgtttgtggcttcctggggaacacctcagaagaattgtgcgtaagatggactcaactgggcgccttctacccttttatgcgcaatcacaactcactgacatctttgcctcaagaaccgtactcatttagtgagccagcacagcaggccatgaggaaggctcttggcctgagatatgcacttctgccgcatctgtacacccttttccaccaggctcatgtccatggagagactgttgcacgacctctgttcttggagttcccaaaagactcttccacgtggacagtcgatcaccagatgctgtggggcgaggctctgctgattacacctgtattgcaacctggtaaggccgaagttaccgggtactttccattggggacctggtatgatctgcaaacagtcccggttgaagctcttggaagtcttccacctccacctgctgcaccaagggagcctgcgatccactctgaaggacagtgggtaactttgcctgcaccgctggacaccatcaatgtccatctgcgcgaaggctacatcataccacttcaaggtcctggactgaccactacagagtctagaaaacaaccaatggctcttgctgttgcactgactaaaagcggcgaagcaaggggtgagctgttctgggacgacggagagtcactggaggtactcgaacgaggcgcgtatacgcaggtcatttttgaggctcgcaataatacgatcgttaacgagctggtccacgtcacttcagaaggtgcaggccttcagttgggcaaggtaactgtcctgggagttgctacagcaccgcagcaggtcttgtccaacggacggcccgtaagcaactttacctatagtcctgataccaaagttctggacatctgcgttgatctgctgatgggtgagcagttcctggtatcatggtgc

SEQ ID NO: 632 - protein, 944 aa, synthetic construct
  REGION 1..944: note = Variant of the Homo Sapiens Lysosomal alpha-glucosidase
MEWSWVFLFFLSVTTGVHSGHILWHDFSTVPRELSGSSQVLEETHPAHQVGASRPGPRDAQLHPGRPRAVPTQCDVPENSRFDCAPEKAITQEQCEARGCCYIPAKQGLQGAQMGQPWCFFPPSYPSYKLENLSQSEMGYTATLTRTTPSFFPKDILTLRLDVMMETENRLHFTIKDPANRRYEVPLETPHVHSRAPSPLYSVEFSEEPFGVIVRRQLDGRVLLNTTVAPLFFADQFLQLSTSLPSQYITGLAEHLSPLMLSTSWNKITLWNRDLAPTPGANLYGSHPFYLALEDGGSAHGVFLLNSNAMDVVLQPSPALSWRSTGGILDVYIFLGPEPKSVVQQYLDVVGYPFMPPYWGLGFHLCRWGYSSTAITRQVVENMTRAHFPLDVQWNDLDYMDSRRDFTFNKDGFRDFPAMVQELHQGGRRYMMIVDPGISSSGPAGSYRPYDEGLRRGVFITNETGQPLIGKVWPGSTAFPDFTNPEALAWWEDMVAEFHDQVPFDGMWIDMNEPSNFIRGSVDGCPNNELENPPYVPGVVGGTLQAATICASSHQFLSTHYNLHNLYGTTEAIASHRALVKARGTRPFVISRSTFAGHGRYAGHWTGDVWSSWEQLASSVPEILQFNLLGVPLVGADVCGFLGNTSEELCVRWTQLGAFYPFMRNHNSLTSLPQEPYSFSEPAQQAMRKALGLRYALLPHLYTLFHQAHVHGETVARPLFLEFPKDSSTWTVDHQMLWGEALLITPVLQPGKAEVTGYFPLGTWYDLQTVPVEALGSLPPPPAAPREPAIHSEGQWVTLPAPLDTINVHLREGYIIPLQGPGLTTTESRKQPMALAVALTKSGEARGELFWDDGESLEVLERGAYTQVIFEARNNTIVNELVHVTSEGAGLQLGKVTVLGVATAPQQVLSNGRPVSNFTYSPDTKVLDICVDLLMGEQFLVSWC

SEQ ID NO: 633 - DNA, 2832 bp, synthetic construct
  misc_feature 1..2832: note = Variant of the Homo Sapiens Lysosomal alpha-glucosidase
  source 1..2832: mol_type = other DNA
atggaatggagctgggtctttctcttcttcctgtcagtaacgactggtgtccactccggacacattctgtggcatgatttttctaccgtgcctagagagctttccggttcaagtcaagtcctcgaagaaacacatccagcccatcaggttggcgcatctaggccgggccctcgggacgctcaactccacccagggagacctagggccgttcccactcagtgcgacgtgccagagaactcacgcttcgattgtgcacctgagaaggctatcacgcaagagcagtgcgaggcccgcggatgttgttacataccggctaaacaggggctgcagggtgcgcagatgggccaaccttggtgcttcttcccaccatcctatccgagttacaagctggagaatctctcccagtctgaaatgggatataccgcaacactgactcggaccaccccctccttctttcccaaagatatcttgactctgagacttgacgtaatgatggagacagaaaacaggctccactttaccattaaggaccctgccaatcgccgatacgaggtgcctctggaaacaccacacgtgcacagtagagctccatcacctctgtattctgtcgagttctccgaagagccgtttggcgttatcgtcaggaggcagctcgacgggcgagtgcttctgaacacgactgtggccccgttgttctttgcggatcagtttctgcaactgtcaacaagtctcccttctcagtacattaccgggcttgcagagcatctgtccccactcatgctgagtacttcatggaacaaaatcacactgtggaatagagaccttgctcctactccaggagccaacttgtatggttctcaccctttctacttggccctggaagatggcggatcagcgcatggcgtattcctcctgaattccaacgcaatggacgttgttcttcagccatctcctgctttgagttggagatctacaggcgggatactggacgtctacatctttctgggtccagagcctaaatccgtagtgcagcagtatcttgatgtcgtcggatacccgtttatgccaccatattggggcctggggttccacttgtgccgctggggatattcatccaccgccattacacgacaagttgttgagaatatgaccagggcacattttcctctggatgtacagtggaacgacctggactacatggatagtcgccgcgacttcaccttcaataaggatgggttcagagactttcctgctatggtccaagaacttcaccagggaggcaggaggtacatgatgatcgtagatccgggaatttcttcttctggcccagccggttcatacagaccgtatgacgaaggactgcgacgaggcgtctttatcacgaacgagactggtcagcctttgataggcaaggtttggccagggtccaccgctttcccggatttcacaaatcctgaggcactggcctggtgggaagatatggtcgccgagtttcacgaccaggtcccatttgacgggatgtggatcgacatgaacgagccatccaacttcattagaggaagtgtggatggctgtccgaataatgagctggaaaaccctccttacgtaccaggcgttgttggtgggactcttcaagctgcgacgatttgcgcatcctcccatcagttcctgtcaacccactataacttgcacaatctgtacgggacaacagaggctatcgccagtcatagggccctggtaaaagctagaggaacacgccctttcgttatctctcgctcaacttttgcaggccacggtaggtatgccggacattggaccggcgacgtctggagttcttgggaacagctggcttcctccgttccagagatattgcagtttaacctgttgggagtcccacttgtaggtgcagatgtttgtggcttcctggggaacacctcagaagaattgtgcgtaagatggactcaactgggcgccttctacccttttatgcgcaatcacaactcactgacatctttgcctcaagaaccgtactcatttagtgagccagcacagcaggccatgaggaaggctcttggcctgagatatgcacttctgccgcatctgtacacccttttccaccaggctcatgtccatggagagactgttgcacgacctctgttcttggagttcccaaaagactcttccacgtggacagtcgatcaccagatgctgtggggcgaggctctgctgattacacctgtattgcaacctggtaaggccgaagttaccgggtactttccattggggacctggtatgatctgcaaacagtcccggttgaagctcttggaagtcttccacctccacctgctgcaccaagggagcctgcgatccactctgaaggacagtgggtaactttgcctgcaccgctggacaccatcaatgtccatctgcgcgaaggctacatcataccacttcaaggtcctggactgaccactacagagtctagataccaaccaatggctcttgctgttgcactgactaaaagcggcgaagcaaggggtgagctgttctgggacgacggagagtcactggaggtactcgaacgaggcgcgtatacgcaggtcatttttgaggctcgcaataatacgatcgttaacgagctggtccacgtcacttcagaaggtgcaggccttcagttgggcaaggtaactgtcctgggagttgctacagcaccgcagcaggtcttgtccaacggacggcccgtaagcaactttacctatagtcctgataccaaagttctggacatctgcgttgctctgctgatgggtgagcagttcctggtatcatggtgc

SEQ ID NO: 634 - protein, 944 aa, synthetic construct
  REGION 1..944: note = Variant of the Homo Sapiens Lysosomal alpha-glucosidase
MEWSWVFLFFLSVTTGVHSGHILWHDFSTVPRELSGSSQVLEETHPAHQVGASRPGPRDAQLHPGRPRAVPTQCDVPENSRFDCAPEKAITQEQCEARGCCYIPAKQGLQGAQMGQPWCFFPPSYPSYKLENLSQSEMGYTATLTRTTPSFFPKDILTLRLDVMMETENRLHFTIKDPANRRYEVPLETPHVHSRAPSPLYSVEFSEEPFGVIVRRQLDGRVLLNTTVAPLFFADQFLQLSTSLPSQYITGLAEHLSPLMLSTSWNKITLWNRDLAPTPGANLYGSHPFYLALEDGGSAHGVFLLNSNAMDVVLQPSPALSWRSTGGILDVYIFLGPEPKSVVQQYLDVVGYPFMPPYWGLGFHLCRWGYSSTAITRQVVENMTRAHFPLDVQWNDLDYMDSRRDFTFNKDGFRDFPAMVQELHQGGRRYMMIVDPGISSSGPAGSYRPYDEGLRRGVFITNETGQPLIGKVWPGSTAFPDFTNPEALAWWEDMVAEFHDQVPFDGMWIDMNEPSNFIRGSVDGCPNNELENPPYVPGVVGGTLQAATICASSHQFLSTHYNLHNLYGTTEAIASHRALVKARGTRPFVISRSTFAGHGRYAGHWTGDVWSSWEQLASSVPEILQFNLLGVPLVGADVCGFLGNTSEELCVRWTQLGAFYPFMRNHNSLTSLPQEPYSFSEPAQQAMRKALGLRYALLPHLYTLFHQAHVHGETVARPLFLEFPKDSSTWTVDHQMLWGEALLITPVLQPGKAEVTGYFPLGTWYDLQTVPVEALGSLPPPPAAPREPAIHSEGQWVTLPAPLDTINVHLREGYIIPLQGPGLTTTESRYQPMALAVALTKSGEARGELFWDDGESLEVLERGAYTQVIFEARNNTIVNELVHVTSEGAGLQLGKVTVLGVATAPQQVLSNGRPVSNFTYSPDTKVLDICVALLMGEQFLVSWC

SEQ ID NO: 635 - DNA, 2832 bp, synthetic construct
  misc_feature 1..2832: note = Variant of the Homo Sapiens Lysosomal alpha-glucosidase
  source 1..2832: mol_type = other DNA
atggaatggagctgggtctttctcttcttcctgtcagtaacgactggtgtccactccggacacattctgtggcatgatttttctaccgtgcctagagagctttccggttcaagtcaagtcctcgaagaaacacatccagcccatcaggttggcgcatctaggccgggccctcgggacgctcaactccacccagggagacctagggccgttcccactcagtgcgacgtgccagagaactcacgcttcgattgtgcacctgagaaggctatcacgcaagagcagtgcgaggcccgcggatgttgttacataccggctaaacaggggctgcagggtgcgcagatgggccaaccttggtgcttcttcccaccatcctatccgagttacaagctggagaatctctccaagtctgaaatgggatataccgcaacactgactcggaccaccccctccttctttcccaaagatatcttgactctgagacttgacgtaatgatggagacagaaaacaggctccactttaccattaaggaccctgccaatcgccgatacgaggtgcctctggaaacaccacacgtgcacagtagagctccatcacctctgtattctgtcgagttctccgaagagccgtttggcgttatcgtcaggaggcagctcgacgggcgagtgcttctgaacacgactgtggccccgttgttctttgcggatcagtttctgcaactgtcaacaagtctcccttctcagtacattaccgggcttgcagagcatctgtccccactcatgctgagtacttcatggaacaaaatcacactgtggaatagagaccttgctcctactccaggagccaacttgtatggttctcaccctttctacttggccctggaagatggcggatcagcgcatggcgtattcctcctgaattccaacgcaatggacgttgttcttcagccatctcctgctttgagttggagatctacaggcgggatactggacgtctacatctttctgggtccagagcctaaatccgtagtgcagcagtatcttgatgtcgtcggatacccgtttatgccaccatattggggcctggggttccacttgtgccgctggggatattcatccaccgccattacacgacaagttgttgagaatatgaccagggcacattttcctctggatgtacagtggaacgacctggactacatggatagtcgccgcgacttcaccttcaataaggatgggttcagagactttcctgctatggtccaagaacttcaccagggaggcaggaggtacatgatgatcgtagatccgggaatttcttcttctggcccagccggttcatacagaccgtatgacgaaggactgcgacgaggcgtctttatcacgaacgagactggtcagcctttgataggcaaggtttggccagggtccaccgctttcccggatttcacaaatcctgaggcactggcctggtgggaagatatggtcgccgagtttcacgaccaggtcccatttgacgggatgtggatcgacatgaacgagccatccaacttcattagaggaagtgtggatggctgtccgaataatgagctggaaaaccctccttacgtaccaggcgttgttggtgggactcttcaagctgcgacgatttgcgcatcctcccatcagttcctgtcaacccactataacttgcacaatctgtacgggacaacagaggctatcgccagtcatagggccctggtaaaagctagaggaacacgccctttcgttatctctcgctcaacttttgcaggccacggtaggtatgccggacattggaccggcgacgtctggagttcttgggaacagctggcttcctccgttccagagatattgcagtttaacctgttgggagtcccacttgtaggtgcagatgtttgtggcttcctggggaacacctcagaagaattgtgcgtaagatggactcaactgggcgccttctacccttttatgcgcaatcacaactcactgacatctttgcctcaagaaccgtactcatttagtgagccagcacagcaggccatgaggaaggctcttggcctgagatatgcacttctgccgcatctgtacacccttttccaccaggctcatgtccatggagagactgttgcacgacctctgttcttggagttcccaaaagactcttccacgtggacagtcgatcaccagatgctgtggggcgaggctctgctgattacacctgtattgcaacctggtaaggccgaagttaccgggtactttccattggggacctggtatgatctgcaaacagtcccggttgaagctcttggaagtcttccacctccacctgctgcaccaagggagcctgcgatccactctgaaggacagtgggtaactttgcctgcaccgctggacaccatcaatgtccatctgcgcgaaggctacatcataccacttcaaggtcctggactgaccactacagagtctagaaaacaaccaatggctcttgctgttgcactgactaaaagcggcgaagcaaggggtgagctgttctgggacgacggagagtcactggaggtactcgaacgaggcgcgtatacgcaggtcatttttgaggctcgcaataatacgatcgttaacgagctggtccacgtcacttcagaaggtgcaggccttcagttgggcaaggtaactgtcctgggagttgctacagcaccgcagcaggtcttgtccaacggacggcccgtaagcaactttacctatagtcctgataccaaagttctggacatctgcgttgctctgctgatgggtgagcagttcctggtatcatggtgc

SEQ ID NO: 636 - protein, 944 aa, synthetic construct
  REGION 1..944: note = Variant of the Homo Sapiens Lysosomal alpha-glucosidase
MEWSWVFLFFLSVTTGVHSGHILWHDFSTVPRELSGSSQVLEETHPAHQVGASRPGPRDAQLHPGRPRAVPTQCDVPENSRFDCAPEKAITQEQCEARGCCYIPAKQGLQGAQMGQPWCFFPPSYPSYKLENLSKSEMGYTATLTRTTPSFFPKDILTLRLDVMMETENRLHFTIKDPANRRYEVPLETPHVHSRAPSPLYSVEFSEEPFGVIVRRQLDGRVLLNTTVAPLFFADQFLQLSTSLPSQYITGLAEHLSPLMLSTSWNKITLWNRDLAPTPGANLYGSHPFYLALEDGGSAHGVFLLNSNAMDVVLQPSPALSWRSTGGILDVYIFLGPEPKSVVQQYLDVVGYPFMPPYWGLGFHLCRWGYSSTAITRQVVENMTRAHFPLDVQWNDLDYMDSRRDFTFNKDGFRDFPAMVQELHQGGRRYMMIVDPGISSSGPAGSYRPYDEGLRRGVFITNETGQPLIGKVWPGSTAFPDFTNPEALAWWEDMVAEFHDQVPFDGMWIDMNEPSNFIRGSVDGCPNNELENPPYVPGVVGGTLQAATICASSHQFLSTHYNLHNLYGTTEAIASHRALVKARGTRPFVISRSTFAGHGRYAGHWTGDVWSSWEQLASSVPEILQFNLLGVPLVGADVCGFLGNTSEELCVRWTQLGAFYPFMRNHNSLTSLPQEPYSFSEPAQQAMRKALGLRYALLPHLYTLFHQAHVHGETVARPLFLEFPKDSSTWTVDHQMLWGEALLITPVLQPGKAEVTGYFPLGTWYDLQTVPVEALGSLPPPPAAPREPAIHSEGQWVTLPAPLDTINVHLREGYIIPLQGPGLTTTESRKQPMALAVALTKSGEARGELFWDDGESLEVLERGAYTQVIFEARNNTIVNELVHVTSEGAGLQLGKVTVLGVATAPQQVLSNGRPVSNFTYSPDTKVLDICVALLMGEQFLVSWC

SEQ ID NO: 637 - DNA, 2832 bp, synthetic construct
  misc_feature 1..2832: note = Variant of the Homo Sapiens Lysosomal alpha-glucosidase
  source 1..2832: mol_type = other DNA
atggaatggagctgggtctttctcttcttcctgtcagtaacgactggtgtccactccggacacattctgtggcatgatttttctaccgtgcctagagagctttccggttcaagtcaagtcctcgaagaaacacatccagcccatcaggttggcgcatctaggccgggccctcgggacgctcaactccacccagggagacctagggccgttcccactcagtgcgacgtgccagagaactcacgcttcgattgtgcacctgagaaggctatcacgcaagagcagtgcgaggcccgcggatgttgttacataccggctaaacaggggctgcagggtgcgcagatgggccaaccttggtgcttcttcccaccatcctatccgagttacaagctggagaatctctcccagtctgaaatgggatataccgcaacactgactcggaccaccccctccttctttcccaaagatatcttgactctgagacttgacgtaatgatggagacagaaaacaggctccactttaccattaaggaccctgccaatcgccgatacgaggtgcctctggaaacaccacacgtgcacagtagagctccatcacctctgtattctgtcgagttctccgaagagccgtttggcgttatcgtcaggaggcagctcgacgggcgagtgcttctgaacacgactgtggccccgttgttctttgcggatcagtttctgcaactgtcaacaagtctcccttctcagtacattaccgggcttgcagagcatctgtccccactcatgctgagtacttcatggaacaaaatcacactgtggaatagagaccttgctcctactccaggagccaacttgtatggttctcaccctttctacttggccctggaagatggcggatcagcgcatggcgtattcctcctgaattccaacgcaatggacgttgttcttcagccatctcctgctttgagttggagatctacaggcgggatactggacgtctacatctttctgggtccagagcctaaatccgtagtgcagcagtatcttgatgtcgtcggatacccgtttatgccaccatattggggcctggggttccacttgtgccgctggggatattcatccaccgccattacacgacaagttgttgagaatatgaccagggcacattttcctctggatgtacagtggaacgacctggactacatggatagtcgccgcgacttcaccttcaataaggatgggttcagagactttcctgctatggtccaagaacttcaccagggaggcaggaggtacatgatgatcgtagatccgggaatttcttcttctggcccagccggttcatacagaccgtatgacgaaggactgcgacgaggcgtctttatcacgaacgagactggtcagcctttgataggcaaggtttggccagggtccaccgctttcccggatttcacaaatcctgaggcactggcctggtgggaagatatggtcgccgagtttcacgaccaggtcccatttgacgggatgtggatcgacatgaacgagccatccaacttcattagaggaagtgtggatggctgtccgaataatgagctggaaaaccctccttacgtaccaggcgttgttggtgggactcttcaagctgcgacgatttgcgcatcctcccatcagttcctgtcaacccactataacttgcacaatctgtacgggacaacagaggctatcgccagtcatagggccctggtaaaagctagaggaacacgccctttcgttatctctcgctcaacttttgcaggccacggtaggtatgccggacattggaccggcgacgtctggagttcttgggaacagctggcttcctccgttccagagatattgcagtttaacctgttgggagtcccacttgtaggtgcagatgtttgtggcttcctggggaacacctcagaagaattgtgcgtaagatggactcaactgggcgccttctacccttttatgcgcaatcacaactcactgacatctttgcctcaagaaccgtactcatttagtgagccagcacagcaggccatgaggaaggctcttgatctgagatatgcacttctgccgcatctgtacacccttttccaccaggctcatgtccatggagagactgttgcacgacctctgttcttggagttcccaaaagactcttccacgtggacagtcgatcaccagatgctgtggggcgaggctctgctgattacacctgtattgcaacctggtaaggccgaagttaccgggtactttccattggggacctggtatgatctgcaaacagtcccggttgaagctcttggaagtcttccacctccacctgctgcaccaagggagcctgcgatccactctgaaggacagtgggtaactttgcctgcaccgctggacaccatcaatgtccatctgcgcgaaggctacatcataccacttcaaggtcctggactgaccactacagagtctagaaaacaaccaatggctcttgctgttgcactgactaaaagcggcgaagcaaggggtgagctgttctgggacgacggagagtcactggaggtactcgaacgaggcgcgtatacgcaggtcatttttgaggctcgcaataatacgatcgttaacgagctggtccacgtcacttcagaaggtgcaggccttcagttgggcaaggtaactgtcctgggagttgctacagcaccgcagcaggtcttgtccaacggacggcccgtaagcaactttacctatagtcctgataccaaagttctggacatctgcgttgctctgctgatgggtgagcagttcctggtatcatggtgc

SEQ ID NO: 638 - protein, 944 aa, synthetic construct
  REGION 1..944: note = Variant of the Homo Sapiens Lysosomal alpha-glucosidase
MEWSWVFLFFLSVTTGVHSGHILWHDFSTVPRELSGSSQVLEETHPAHQVGASRPGPRDAQLHPGRPRAVPTQCDVPENSRFDCAPEKAITQEQCEARGCCYIPAKQGLQGAQMGQPWCFFPPSYPSYKLENLSQSEMGYTATLTRTTPSFFPKDILTLRLDVMMETENRLHFTIKDPANRRYEVPLETPHVHSRAPSPLYSVEFSEEPFGVIVRRQLDGRVLLNTTVAPLFFADQFLQLSTSLPSQYITGLAEHLSPLMLSTSWNKITLWNRDLAPTPGANLYGSHPFYLALEDGGSAHGVFLLNSNAMDVVLQPSPALSWRSTGGILDVYIFLGPEPKSVVQQYLDVVGYPFMPPYWGLGFHLCRWGYSSTAITRQVVENMTRAHFPLDVQWNDLDYMDSRRDFTFNKDGFRDFPAMVQELHQGGRRYMMIVDPGISSSGPAGSYRPYDEGLRRGVFITNETGQPLIGKVWPGSTAFPDFTNPEALAWWEDMVAEFHDQVPFDGMWIDMNEPSNFIRGSVDGCPNNELENPPYVPGVVGGTLQAATICASSHQFLSTHYNLHNLYGTTEAIASHRALVKARGTRPFVISRSTFAGHGRYAGHWTGDVWSSWEQLASSVPEILQFNLLGVPLVGADVCGFLGNTSEELCVRWTQLGAFYPFMRNHNSLTSLPQEPYSFSEPAQQAMRKALDLRYALLPHLYTLFHQAHVHGETVARPLFLEFPKDSSTWTVDHQMLWGEALLITPVLQPGKAEVTGYFPLGTWYDLQTVPVEALGSLPPPPAAPREPAIHSEGQWVTLPAPLDTINVHLREGYIIPLQGPGLTTTESRKQPMALAVALTKSGEARGELFWDDGESLEVLERGAYTQVIFEARNNTIVNELVHVTSEGAGLQLGKVTVLGVATAPQQVLSNGRPVSNFTYSPDTKVLDICVALLMGEQFLVSWC

SEQ ID NO: 639 - DNA, 2832 bp, synthetic construct
  misc_feature 1..2832: note = Variant of the Homo Sapiens Lysosomal alpha-glucosidase
  source 1..2832: mol_type = other DNA
atggaatggagctgggtctttctcttcttcctgtcagtaacgactggtgtccactccggacacattctgtggcatgattttgggaccgtgcctagagagctttccggttcaagtcaagtcctcgaagaaacacatccagcccatcaggttggcgcatctaggccgggccctcgggacgctcaactccacccagggagacctagggccgttcccactcagtgcgacgtgccagagaactcacgcttcgattgtgcacctgagaaggctatcacgcaagagcagtgcgaggcccgcggatgttgttacataccggctaaacaggggctgcagggtgcgcagatgggccaaccttggtgcttcttcccaccatcctatccgagttacaagctggagaatctctcccagtctgaaatgggatataccgcaacactgactcggaccaccccctccttctttcccaaagatatcttgactctgagacttgacgtaatgatggagacagaaaacaggctccactttaccattaaggaccctgccaatcgccgatacgaggtgcctctggaaacaccacacgtgcacagtagagctccatcacctctgtattctgtcgagttctccgaagagccgtttggcgttatcgtcaggaggcagctcgacgggcgagtgcttctgaacacgactgtggccccgttgttctttgcggatcagtttctgcaactgtcaacaagtctcccttctcagtacattaccgggcttgcagagcatctgtccccactcatgctgagtacttcatggaacaaaatcacactgtggaatagagaccttgctcctactccaggagccaacttgtatggttctcaccctttctacttggccctggaagatggcggatcagcgcatggcgtattcctcctgaattccaacgcaatggacgttgttcttcagccatctcctgctttgagttggagatctacaggcgggatactggacgtctacatctttctgggtccagagcctaaatccgtagtgcagcagtatcttgatgtcgtcggatacccgtttatgccaccatattggggcctggggttccacttgtgccgctggggatattcatccaccgccattacacgacaagttgttgagaatatgaccagggcacattttcctctggatgtacagtggaacgacctggactacatggatagtcgccgcgacttcaccttcaataaggatgggttcagagactttcctgctatggtccaagaacttcaccagggaggcaggaggtacatgatgatcgtagatccgggaatttcttcttctggcccagccggttcatacagaccgtatgacgaaggactgcgacgaggcgtctttatcacgaacgagactggtcagcctttgataggcaaggtttggccagggtccaccgctttcccggatttcacaaatcctgaggcactggcctggtgggaagatatggtcgccgagtttcacgaccaggtcccatttgacgggatgtggatcgacatgaacgagccatccaacttcattagaggaagtgtggatggctgtccgaataatgagctggaaaaccctccttacgtaccaggcgttgttggtgggactcttcaagctgcgacgatttgcgcatcctcccatcagttcctgtcaacccactataacttgcacaatctgtacgggacaacagaggctatcgccagtcatagggccctggtaaaagctagaggaacacgccctttcgttatctctcgctcaacttttgcaggccacggtaggtatgccggacattggaccggcgacgtctggagttcttgggaacagctggcttcctccgttccagagatattgcagtttaacctgttgggagtcccacttgtaggtgcagatgtttgtggcttcctggggaacacctcagaagaattgtgcgtaagatggactcaactgggcgccttctacccttttatgcgcaatcacaactcactgacatctttgcctcaagaaccgtactcatttagtgagccagcacagcaggccatgaggaaggctcttggcctgagatatgcacttctgccgcatctgtacacccttttccaccaggctcatgtccatggagagactgttgcacgacctctgttcttggagttcccaaaagactcttccacgtggacagtcgatcaccagatgctgtggggcgaggctctgctgattacacctgtattgcaacctggtaaggccgaagttaccgggtactttccattggggacctggtatgatctgcaaacagtcccggttgaagctcttggaagtcttccacctccacctgctgcaccaagggagcctgcgatccactctgaaggacagtgggtaactttgcctgcaccgctggacaccatcaatgtccatctgcgcgaaggctacatcataccacttcaaggtcctggactgaccactacagagtctagaaaacaaccaatggctcttgctgttgcactgactaaaagcggcgaagcaaggggtgagctgttctgggacgacggagagtcactggaggtactcgaacgaggcgcgtatacgcaggtcatttttgaggctcgcaataatacgatcgttaacgagctggtccacgtcacttcagaaggtgcaggccttcagttgggcaaggtaactgtcctgggagttgctacagcaccgcagcaggtcttgtccaacggacggcccgtaagcaactttacctatagtcctgataccaaagttctggacatctgcgttgctctgctgatgggtgagcagttcctggtatcatggtgc

SEQ ID NO: 640 - protein, 944 aa, synthetic construct
  REGION 1..944: note = Variant of the Homo Sapiens Lysosomal alpha-glucosidase
MEWSWVFLFFLSVTTGVHSGHILWHDFGTVPRELSGSSQVLEETHPAHQVGASRPGPRDAQLHPGRPRAVPTQCDVPENSRFDCAPEKAITQEQCEARGCCYIPAKQGLQGAQMGQPWCFFPPSYPSYKLENLSQSEMGYTATLTRTTPSFFPKDILTLRLDVMMETENRLHFTIKDPANRRYEVPLETPHVHSRAPSPLYSVEFSEEPFGVIVRRQLDGRVLLNTTVAPLFFADQFLQLSTSLPSQYITGLAEHLSPLMLSTSWNKITLWNRDLAPTPGANLYGSHPFYLALEDGGSAHGVFLLNSNAMDVVLQPSPALSWRSTGGILDVYIFLGPEPKSVVQQYLDVVGYPFMPPYWGLGFHLCRWGYSSTAITRQVVENMTRAHFPLDVQWNDLDYMDSRRDFTFNKDGFRDFPAMVQELHQGGRRYMMIVDPGISSSGPAGSYRPYDEGLRRGVFITNETGQPLIGKVWPGSTAFPDFTNPEALAWWEDMVAEFHDQVPFDGMWIDMNEPSNFIRGSVDGCPNNELENPPYVPGVVGGTLQAATICASSHQFLSTHYNLHNLYGTTEAIASHRALVKARGTRPFVISRSTFAGHGRYAGHWTGDVWSSWEQLASSVPEILQFNLLGVPLVGADVCGFLGNTSEELCVRWTQLGAFYPFMRNHNSLTSLPQEPYSFSEPAQQAMRKALGLRYALLPHLYTLFHQAHVHGETVARPLFLEFPKDSSTWTVDHQMLWGEALLITPVLQPGKAEVTGYFPLGTWYDLQTVPVEALGSLPPPPAAPREPAIHSEGQWVTLPAPLDTINVHLREGYIIPLQGPGLTTTESRKQPMALAVALTKSGEARGELFWDDGESLEVLERGAYTQVIFEARNNTIVNELVHVTSEGAGLQLGKVTVLGVATAPQQVLSNGRPVSNFTYSPDTKVLDICVALLMGEQFLVSWC

SEQ ID NO: 641 - DNA, 2832 bp, synthetic construct
  misc_feature 1..2832: note = Variant of the Homo Sapiens Lysosomal alpha-glucosidase
  source 1..2832: mol_type = other DNA
atggaatggagctgggtctttctcttcttcctgtcagtaacgactggtgtccactccggacacattctgtggcatgatttttctaccgtgcctagagagctttccggttcaagtcaagtcctcgaagaaacacatccagcccatcaggttggcgcatctaggccgggccctcgggacgctcaactccacccagggagacctagggccgttcccactcagtgcgacgtgccagagaactcacgcttcgattgtgcacctgagaaggctatcacgcaagagcagtgcgaggcccgcggatgttgttacataccggctaaacaggggctgcagggtgcgcagatgggccaaccttggtgcttcttcccaccatcctatccgagttacaagctggagaatctctcccagtctgaaatgggatataccgcaacactgactcggaccaccccctccttctttcccaaagatatcttgactctgagacttgacgtaatgatggagacagaaaacaggctccactttaccattaaggaccctgccaatcgccgatacgaggtgcctctggaaacaccacacgtgcacagtagagctccatcacctctgtattctgtcgagttctccgaagagccgtttggcgttatcgtcaggaggcagctcgacgggcgagtgcttctgaacacgactgtggccccgttgttctttgcggatcagtttctgcaactgtcaacaagtctcccttctcagtacattaccgggcttgcagagcatctgtccccactcatgctgagtacttcatggaacaaaatcacactgtggaatagagaccttgctcctactccaggagccaacttgtatggttctcaccctttctacttggccctggaagatggcggatcagcgcatggcgtattcctcctgaattccaacgcaatggacgttgttcttcagccatctcctgctttgagttggagatctacaggcgggatactggacgtctacatctttctgggtccagagcctaaatccgtagtgcagcagtatcttgatgtcgtcggatacccgtttatgccaccatattggggcctggggttccacttgtgccgctggggatattcatccaccgccattacacgacaagttgttgagaatatgaccagggcacattttcctctggatgtacagtggaacgacctggactacatggatagtcgccgcgacttcaccttcaataaggatgggttcagagactttcctgctatggtccaagaacttcaccagggaggcaggaggtacatgatgatcgtagatccgggaatttcttcttctggcccagccggttcatacagaccgtatgacgaaggactgcgacgaggcgtctttatcacgaacgagactggtcagcctttgataggcaaggtttggccagggtccaccgctttcccggatttcacaaatcctgaggcactggcctggtgggaagatatggtcgccgagtttcacgaccaggtcccatttgacgggatgtggatcgacatgaacgagccatccaacttcattagaggaagtgtggatggctgtccgaataatgagctggaaaaccctccttacgtaccaggcgttgttggtgggactcttcaagctgcgacgatttgcgcatcctcccatcagttcctgtcaacccactataacttgcacaatctgtacgggacaacagaggctatcgccagtcatagggccctggtaaaagctagaggaacacgccctttcgttatctctcgctcaacttttgcaggccacggtaggtatgccggacattggaccggcgacgtctggagttcttgggaacagctggcttcctccgttccagagatattgcagtttaacctgttgggagtcccacttgtaggtgcagatgtttgtggcttcctggggaacacctcagaagaattgtgcgtaagatggactcaactgggcgccttctacccttttatgcgcaatcacaactcactgacatctttgcctcaagaaccgtactcatttagtgagccagcacagcaggccatgaggaaggctcttggcctgagatatgcacttctgccgcatctgtacacccttttccaccaggctcatgtcaacggagagactgttgcacgacctctgttcttggagttcccaaaagactcttccacgtggacagtcgatcaccagatgctgtggggcgaggctctgctgattacacctgtattgcaacctggtaaggccgaagttaccgggtactttccattggggacctggtatgatctgcaaacagtcccggttgaagctcttggaagtcttccacctccacctgctgcaccaagggagcctgcgatccactctgaaggacagtgggtaactttgcctgcaccgctggacaccatcaatgtccatctgcgcgaaggctacatcataccacttcaaggtcctggactgaccactacagagtctagaaaacaaccaatggctcttgctgttgcactgactaaaagcggcgaagcaaggggtgagctgttctgggacgacggagagtcactggaggtactcgaacgaggcgcgtatacgcaggtcatttttgaggctcgcaataatacgatcgttaacgagctggtccacgtcacttcagaaggtgcaggccttcagttgggcaaggtaactgtcctgggagttgctacagcaccgcagcaggtcttgtccaacggacggcccgtaagcaactttacctatagtcctgataccaaagttctggacatctgcgttgctctgctgatgggtgagcagttcctggtatcatggtgc

SEQ ID NO: 642 - protein, 944 aa, synthetic construct
  REGION 1..944: note = Variant of the Homo Sapiens Lysosomal alpha-glucosidase
MEWSWVFLFFLSVTTGVHSGHILWHDFSTVPRELSGSSQVLEETHPAHQVGASRPGPRDAQLHPGRPRAVPTQCDVPENSRFDCAPEKAITQEQCEARGCCYIPAKQGLQGAQMGQPWCFFPPSYPSYKLENLSQSEMGYTATLTRTTPSFFPKDILTLRLDVMMETENRLHFTIKDPANRRYEVPLETPHVHSRAPSPLYSVEFSEEPFGVIVRRQLDGRVLLNTTVAPLFFADQFLQLSTSLPSQYITGLAEHLSPLMLSTSWNKITLWNRDLAPTPGANLYGSHPFYLALEDGGSAHGVFLLNSNAMDVVLQPSPALSWRSTGGILDVYIFLGPEPKSVVQQYLDVVGYPFMPPYWGLGFHLCRWGYSSTAITRQVVENMTRAHFPLDVQWNDLDYMDSRRDFTFNKDGFRDFPAMVQELHQGGRRYMMIVDPGISSSGPAGSYRPYDEGLRRGVFITNETGQPLIGKVWPGSTAFPDFTNPEALAWWEDMVAEFHDQVPFDGMWIDMNEPSNFIRGSVDGCPNNELENPPYVPGVVGGTLQAATICASSHQFLSTHYNLHNLYGTTEAIASHRALVKARGTRPFVISRSTFAGHGRYAGHWTGDVWSSWEQLASSVPEILQFNLLGVPLVGADVCGFLGNTSEELCVRWTQLGAFYPFMRNHNSLTSLPQEPYSFSEPAQQAMRKALGLRYALLPHLYTLFHQAHVNGETVARPLFLEFPKDSSTWTVDHQMLWGEALLITPVLQPGKAEVTGYFPLGTWYDLQTVPVEALGSLPPPPAAPREPAIHSEGQWVTLPAPLDTINVHLREGYIIPLQGPGLTTTESRKQPMALAVALTKSGEARGELFWDDGESLEVLERGAYTQVIFEARNNTIVNELVHVTSEGAGLQLGKVTVLGVATAPQQVLSNGRPVSNFTYSPDTKVLDICVALLMGEQFLVSWC

SEQ ID NO: 643 - DNA, 2832 bp, synthetic construct
  misc_feature 1..2832: note = Variant of the Homo Sapiens Lysosomal alpha-glucosidase
  source 1..2832: mol_type = other DNA
atggaatggagctgggtctttctcttcttcctgtcagtaacgactggtgtccactccggacacattctgtggcatgatttttctaccgtgcctagagagctttccggttcaagtcaagtcctcgaagaaacacatccagcccatcaggttggcgcatctaggccgggccctcgggacgctcaactccacccagggagacctagggccgttcccactcagtgcgacgtgccagagaactcacgcttcgattgtgcacctgagaaggctatcacgcaagagcagtgcgaggcccgcggatgttgttacataccggctaaacaggggctgcagggtgcgcagatgggccaaccttggtgcttcttcccaccatcctatccgagttacaagctggagaatctctcccagtctgaaatgggatataccgcaacactgactcggaccaccccctccttctttcccaaagatatcttgactctgagacttgacgtaatgatggagacagaaaacaggctccactttaccattaaggaccctgccaatcgccgatacgaggtgcctctggaaacaccacacgtgcacagtagagctccatcacctctgtattctgtcgagttctccgaagagccgtttggcgttatcgtcaggaggcagctcgacgggcgagtgcttctgaacacgactgtggccccgttgttctttgcggatcagtttctgcaactgtcaacaagtctcccttctcagtacattaccgggcttgcagagcatctgtccccactcatgctgagtacttcatggaacaaaatcacactgtggaatagagaccttgctcctactccaggagccaacttgtatggttctcaccctttctacttggccctggaagatggcggatcagcgcatggcgtattcctcctgaattccaacgcaatggacgttgttcttcagccatctcctgctttgagttggagatctacaggcgggatactggacgtctacatctttctgggtccagagcctaaatccgtagtgcagcagtatcttgatgtcgtcggatacccgtttatgccaccatattggggcctggggttccacttgtgccgctggggatattcatccaccgccattacacgacaagttgttgagaatatgaccagggcacattttcctctggatgtacagtggaacgacctggactacatggatagtcgccgcgacttcaccttcaataaggatgggttcagagactttcctgctatggtccaagaacttcaccagggaggcaggaggtacatgatgatcgtagatccgggaatttcttcttctggcccagccggttcatacagaccgtatgacgaaggactgcgacgaggcgtctttatcacgaacgagactggtcagcctttgataggcaaggtttggccagggtccaccgctttcccggatttcacaaatccttgggcactggcctggtgggaagatatggtcgccgagtttcacgaccaggtcccatttgacgggatgtggatcgacatgaacgagccatccaacttcattagaggaagtgtggatggctgtccgaataatgagctggaaaaccctccttacgtaccaggcgttgttggtgggactcttcaagctgcgacgatttgcgcatcctcccatcagttcctgtcaacccactataacttgcacaatctgtacgggacaacagaggctatcgccagtcatagggccctggtaaaagctagaggaacacgccctttcgttatctctcgctcaacttttgcaggccacggtaggtatgccggacattggaccggcgacgtctggagttcttgggaacagctggcttcctccgttccagagatattgcagtttaacctgttgggagtcccacttgtaggtgcagatgtttgtggcttcctggggaacacctcagaagaattgtgcgtaagatggactcaactgggcgccttctacccttttatgcgcaatcacaactcactgacatctttgcctcaagaaccgtactcatttagtgagccagcacagcaggccatgaggaaggctcttggcctgagatatgcacttctgccgcatctgtacacccttttccaccaggctcatgtccatggagagactgttgcacgacctctgttcttggagttcccaaaagactcttccacgtggacagtcgatcaccagatgctgtggggcgaggctctgctgattacacctgtattgcaacctggtaaggccgaagttaccgggtactttccattggggacctggtatgatctgcaaacagtcccggttgaagctcttggaagtcttccacctccacctgctgcaccaagggagcctgcgatccactctgaaggacagtgggtaactttgcctgcaccgctggacaccatcaatgtccatctgcgcgaaggctacatcataccacttcaaggtcctggactgaccactacagagtctagaaaacaaccaatggctcttgctgttgcactgactaaaagcggcgaagcaaggggtgagctgttctgggacgacggagagtcactggaggtactcgaacgaggcgcgtatacgcaggtcatttttgaggctcgcaataatacgatcgttaacgagctggtccacgtcacttcagaaggtgcaggccttcagttgggcaaggtaactgtcctgggagttgctacagcaccgcagcaggtcttgtccaacggacggcccgtaagcaactttacctatagtcctgataccaaagttctggacatctgcgttgctctgctgatgggtgagcagttcctggtatcatggtgc

SEQ ID NO: 644 - protein, 944 aa, synthetic construct
  REGION 1..944: note = Variant of the Homo Sapiens Lysosomal alpha-glucosidase
MEWSWVFLFFLSVTTGVHSGHILWHDFSTVPRELSGSSQVLEETHPAHQVGASRPGPRDAQLHPGRPRAVPTQCDVPENSRFDCAPEKAITQEQCEARGCCYIPAKQGLQGAQMGQPWCFFPPSYPSYKLENLSQSEMGYTATLTRTTPSFFPKDILTLRLDVMMETENRLHFTIKDPANRRYEVPLETPHVHSRAPSPLYSVEFSEEPFGVIVRRQLDGRVLLNTTVAPLFFADQFLQLSTSLPSQYITGLAEHLSPLMLSTSWNKITLWNRDLAPTPGANLYGSHPFYLALEDGGSAHGVFLLNSNAMDVVLQPSPALSWRSTGGILDVYIFLGPEPKSVVQQYLDVVGYPFMPPYWGLGFHLCRWGYSSTAITRQVVENMTRAHFPLDVQWNDLDYMDSRRDFTFNKDGFRDFPAMVQELHQGGRRYMMIVDPGISSSGPAGSYRPYDEGLRRGVFITNETGQPLIGKVWPGSTAFPDFTNPWALAWWEDMVAEFHDQVPFDGMWIDMNEPSNFIRGSVDGCPNNELENPPYVPGVVGGTLQAATICASSHQFLSTHYNLHNLYGTTEAIASHRALVKARGTRPFVISRSTFAGHGRYAGHWTGDVWSSWEQLASSVPEILQFNLLGVPLVGADVCGFLGNTSEELCVRWTQLGAFYPFMRNHNSLTSLPQEPYSFSEPAQQAMRKALGLRYALLPHLYTLFHQAHVHGETVARPLFLEFPKDSSTWTVDHQMLWGEALLITPVLQPGKAEVTGYFPLGTWYDLQTVPVEALGSLPPPPAAPREPAIHSEGQWVTLPAPLDTINVHLREGYIIPLQGPGLTTTESRKQPMALAVALTKSGEARGELFWDDGESLEVLERGAYTQVIFEARNNTIVNELVHVTSEGAGLQLGKVTVLGVATAPQQVLSNGRPVSNFTYSPDTKVLDICVALLMGEQFLVSWC

SEQ ID NO: 645 - DNA, 2832 bp, synthetic construct
  misc_feature 1..2832: note = Variant of the Homo Sapiens Lysosomal alpha-glucosidase
  source 1..2832: mol_type = other DNA
atggaatggagctgggtctttctcttcttcctgtcagtaacgactggtgtccactccggacacattctgtggcatgatttttctaccgtgcctagagagctttccggttcaagtcaagtcctcgaagaaacacatccagcccatcaggacggcgcatctaggccgggccctcgggacgctcaactccacccagggagacctagggccgttcccactcagtgcgacgtgccagagaactcacgcttcgattgtgcacctgagaaggctatcacgcaagagcagtgcgaggcccgcggatgttgttacataccggctaaacaggggctgcagggtgcgcagatgggccaaccttggtgcttcttcccaccatcctatccgagttacaagctggagaatctctcccagtctgaaatgggatataccgcaacactgactcggaccaccccctccttctttcccaaagatatcttgactctgagacttgacgtaatgatggagacagaaaacaggctccactttaccattaaggaccctgccaatcgccgatacgaggtgcctctggaaacaccacacgtgcacagtagagctccatcacctctgtattctgtcgagttctccgaagagccgtttggcgttatcgtcaggaggcagctcgacgggcgagtgcttctgaacacgactgtggccccgttgttctttgcggatcagtttctgcaactgtcaacaagtctcccttctcagtacattaccgggcttgcagagcatctgtccccactcatgctgagtacttcatggaacaaaatcacactgtggaatagagaccttgctcctactccaggagccaacttgtatggttctcaccctttctacttggccctggaagatggcggatcagcgcatggcgtattcctcctgaattccaacgcaatggacgttgttcttcagccatctcctgctttgagttggagatctacaggcgggatactggacgtctacatctttctgggtccagagcctaaatccgtagtgcagcagtatcttgatgtcgtcggatacccgtttatgccaccatattggggcctggggttccacttgtgccgctggggatattcatccaccgccattacacgacaagttgttgagaatatgaccagggcacattttcctctggatgtacagtggaacgacctggactacatggatagtcgccgcgacttcaccttcaataaggatgggttcagagactttcctgctatggtccaagaacttcaccagggaggcaggaggtacatgatgatcgtagatccgggaatttcttcttctggcccagccggttcatacagaccgtatgacgaaggactgcgacgaggcgtctttatcacgaacgagactggtcagcctttgataggcaaggtttggccagggtccaccgctttcccggatttcacaaatcctgaggcactggcctggtgggaagatatggtcgccgagtttcacgaccaggtcccatttgacgggatgtggatcgacatgaacgagccatccaacttcattagaggaagtgtggatggctgtccgaataatgagctggaaaaccctccttacgtaccaggcgttgttggtgggactcttcaagctgcgacgatttgcgcatcctcccatcagttcctgtcaacccactataacttgcacaatctgtacgggacaacagaggctatcgccagtcatagggccctggtaaaagctagaggaacacgccctttcgttatctctcgctcaacttttgcaggccacggtaggtatgccggacattggaccggcgacgtctggagttcttgggaacagctggcttcctccgttccagagatattgcagtttaacctgttgggagtcccacttgtaggtgcagatgtttgtggcttcctggggaacacctcagaagaattgtgcgtaagatggactcaactgggcgccttctacccttttatgcgcaatcacaactcactgacatctttgcctcaagaaccgtactcatttagtgagccagcacagcaggccatgaggaaggctcttggcctgagatatgcacttctgccgcatctgtacacccttttccaccaggctcatgtccatggagagactgttgcacgacctctgttcttggagttcccaaaagactcttccacgtggacagtcgatcaccagatgctgtggggcgaggctctgctgattacacctgtattgcaacctggtaaggccgaagttaccgggtactttccattggggacctggtatgatctgcaaacagtcccggttgaagctcttggaagtcttccacctccacctgctgcaccaagggagcctgcgatccactctgaaggacagtgggtaactttgcctgcaccgctggacaccatcaatgtccatctgcgcgaaggctacatcataccacttcaaggtcctggactgaccactacagagtctagaaaacaaccaatggctcttgctgttgcactgactaaaagcggcgaagcaaggggtgagctgttctgggacgacggagagtcactggaggtactcgaacgaggcgcgtatacgcaggtcatttttgaggctcgcaataatacgatcgttaacgagctggtccacgtcacttcagaaggtgcaggccttcagttgggcaaggtaactgtcctgggagttgctacagcaccgcagcaggtcttgtccaacggacggcccgtaagcaactttacctatagtcctgataccaaagttctggacatctgcgttgctctgctgatgggtgagcagttcctggtatcatggtgc

SEQ ID NO: 646 - protein, 944 aa, synthetic construct
  REGION 1..944: note = Variant of the Homo Sapiens Lysosomal alpha-glucosidase
MEWSWVFLFFLSVTTGVHSGHILWHDFSTVPRELSGSSQVLEETHPAHQDGASRPGPRDAQLHPGRPRAVPTQCDVPENSRFDCAPEKAITQEQCEARGCCYIPAKQGLQGAQMGQPWCFFPPSYPSYKLENLSQSEMGYTATLTRTTPSFFPKDILTLRLDVMMETENRLHFTIKDPANRRYEVPLETPHVHSRAPSPLYSVEFSEEPFGVIVRRQLDGRVLLNTTVAPLFFADQFLQLSTSLPSQYITGLAEHLSPLMLSTSWNKITLWNRDLAPTPGANLYGSHPFYLALEDGGSAHGVFLLNSNAMDVVLQPSPALSWRSTGGILDVYIFLGPEPKSVVQQYLDVVGYPFMPPYWGLGFHLCRWGYSSTAITRQVVENMTRAHFPLDVQWNDLDYMDSRRDFTFNKDGFRDFPAMVQELHQGGRRYMMIVDPGISSSGPAGSYRPYDEGLRRGVFITNETGQPLIGKVWPGSTAFPDFTNPEALAWWEDMVAEFHDQVPFDGMWIDMNEPSNFIRGSVDGCPNNELENPPYVPGVVGGTLQAATICASSHQFLSTHYNLHNLYGTTEAIASHRALVKARGTRPFVISRSTFAGHGRYAGHWTGDVWSSWEQLASSVPEILQFNLLGVPLVGADVCGFLGNTSEELCVRWTQLGAFYPFMRNHNSLTSLPQEPYSFSEPAQQAMRKALGLRYALLPHLYTLFHQAHVHGETVARPLFLEFPKDSSTWTVDHQMLWGEALLITPVLQPGKAEVTGYFPLGTWYDLQTVPVEALGSLPPPPAAPREPAIHSEGQWVTLPAPLDTINVHLREGYIIPLQGPGLTTTESRKQPMALAVALTKSGEARGELFWDDGESLEVLERGAYTQVIFEARNNTIVNELVHVTSEGAGLQLGKVTVLGVATAPQQVLSNGRPVSNFTYSPDTKVLDICVALLMGEQFLVSWC

SEQ ID NO: 647 - DNA, 2832 bp, synthetic construct
  misc_feature 1..2832: note = Variant of the Homo Sapiens Lysosomal alpha-glucosidase
  source 1..2832: mol_type = other DNA
atggaatggagctgggtctttctcttcttcctgtcagtaacgactggtgtccactccggacacattctgtggcatgatttttctaccgtgcctagagagctttccggttcaagtcaagtcctcgaagaaacacatccagcccatcaggttggcgcatctaggccgggccctcgggacgctcaactccacccagggagacctagggccgttcccactcagtgcgacgtgccagagaactcacgcttcgattgtgcacctgagaaggctatcacgcaagagcagtgcgaggcccgcggatgttgttacataccggctaaacaggggctgcagggtgcgcagatgggccaaccttggtgcttcttcccaccatcctatccgagttacaagctggagaatctctcccagtctgaaatgggatataccgcaacactgactcggaccaccccctccttctttcccaaagatatcttgactctgagacttgacgtaatgatggagacagaaaacaggctccactttaccattaaggaccctgccaatcgccgatacgaggtgcctctggaaacaccacacgtgcacagtagagctccatcacctctgtattctgtcgagttctccgaagagccgtttggcgttatcgtcaggaggcagctcgacgggcgagtgcttctgaacacgactgtggccccgttgttctttgcggatcagtttctgcaactgtcaacaagtctcccttctcagtacattaccgggcttgcagagcatctgtccccactcatgctgagtacttcatggaacaaaatcacactgtggaatagagaccttgctcctactccaggagccaacttgtatggttctcaccctttctacttggccctggaagatggcggatcagcgcatggcgtattcctcctgaattccaacgcaatggacgttgttcttcagccatctcctgctttgagttggagatctacaggcgggatactggacgtctacatctttctgggtccagagcctaaatccgtagtgcagcagtatcttgatgtcgtcggatacccgtttatgccaccatattggggcctggggttccacttgtgccgctggggatattcatccaccgccattacacgacaagttgttgagaatatgaccagggcacattttcctctggatgtacagtggaacgacctggactacatggatagtcgccgcgacttcaccttcaataaggatgggttcagagactttcctgctatggtccaagaacttcaccagggaggcaggaggtacatgatgatcgtagatccgggaatttcttcttctggcccagccggttcatacagaccgtatgacgaaggactgcgacgaggcgtctttatcacgaacgagactggtcagcctttgataggcaaggtttggccagggtccaccgctttcccggatttcacaaatcctgccgcactggcctggtgggaagatatggtcgccgagtttcacgaccaggtcccatttgacgggatgtggatcgacatgaacgagccatccaacttcattagaggaagtgtggatggctgtccgaataatgagctggaaaaccctccttacgtaccaggcgttgttggtgggactcttcaagctgcgacgatttgcgcatcctcccatcagttcctgtcaacccactataacttgcacaatctgtacgggacaacagaggctatcgccagtcatagggccctggtaaaagctagaggaacacgccctttcgttatctctcgctcaacttttgcaggccacggtaggtatgccggacattggaccggcgacgtctggagttcttgggaacagctggcttcctccgttccagagatattgcagtttaacctgttgggagtcccacttgtaggtgcagatgtttgtggcttcctggggaacacctcagaagaattgtgcgtaagatggactcaactgggcgccttctacccttttatgcgcaatcacaactcactgacatctttgcctcaagaaccgtactcatttagtgagccagcacagcaggccatgaggaaggctcttggcctgagatatgcacttctgccgcatctgtacacccttttccaccaggctcatgtccatggagagactgttgcacgacctctgttcttggagttcccaaaagactcttccacgtggacagtcgatcaccagatgctgtggggcgaggctctgctgattacacctgtattgcaacctggtaaggccgaagttaccgggtactttccattggggacctggtatgatctgcaaacagtcccggttgaagctcttggaagtcttccacctccacctgctgcaccaagggagcctgcgatccactctgaaggacagtgggtaactttgcctgcaccgctggacaccatcaatgtccatctgcgcgaaggctacatcataccacttcaaggtcctggactgaccactacagagtctagaaaacaaccaatggctcttgctgttgcactgactaaaagcggcgaagcaaggggtgagctgttctgggacgacggagagtcactggaggtactcgaacgaggcgcgtatacgcaggtcatttttgaggctcgcaataatacgatcgttaacgagctggtccacgtcacttcagaaggtgcaggccttcagttgggcaaggtaactgtcctgggagttgctacagcaccgcagcaggtcttgtccaacggacggcccgtaagcaactttacctatagtcctgataccaaagttctggacatctgcgttgctctgctgatgggtgagcagttcctggtatcatggtgc

SEQ ID NO: 648 - protein, 944 aa, synthetic construct
  REGION 1..944: note = Variant of the Homo Sapiens Lysosomal alpha-glucosidase
MEWSWVFLFFLSVTTGVHSGHILWHDFSTVPRELSGSSQVLEETHPAHQVGASRPGPRDAQLHPGRPRAVPTQCDVPENSRFDCAPEKAITQEQCEARGCCYIPAKQGLQGAQMGQPWCFFPPSYPSYKLENLSQSEMGYTATLTRTTPSFFPKDILTLRLDVMMETENRLHFTIKDPANRRYEVPLETPHVHSRAPSPLYSVEFSEEPFGVIVRRQLDGRVLLNTTVAPLFFADQFLQLSTSLPSQYITGLAEHLSPLMLSTSWNKITLWNRDLAPTPGANLYGSHPFYLALEDGGSAHGVFLLNSNAMDVVLQPSPALSWRSTGGILDVYIFLGPEPKSVVQQYLDVVGYPFMPPYWGLGFHLCRWGYSSTAITRQVVENMTRAHFPLDVQWNDLDYMDSRRDFTFNKDGFRDFPAMVQELHQGGRRYMMIVDPGISSSGPAGSYRPYDEGLRRGVFITNETGQPLIGKVWPGSTAFPDFTNPAALAWWEDMVAEFHDQVPFDGMWIDMNEPSNFIRGSVDGCPNNELENPPYVPGVVGGTLQAATICASSHQFLSTHYNLHNLYGTTEAIASHRALVKARGTRPFVISRSTFAGHGRYAGHWTGDVWSSWEQLASSVPEILQFNLLGVPLVGADVCGFLGNTSEELCVRWTQLGAFYPFMRNHNSLTSLPQEPYSFSEPAQQAMRKALGLRYALLPHLYTLFHQAHVHGETVARPLFLEFPKDSSTWTVDHQMLWGEALLITPVLQPGKAEVTGYFPLGTWYDLQTVPVEALGSLPPPPAAPREPAIHSEGQWVTLPAPLDTINVHLREGYIIPLQGPGLTTTESRKQPMALAVALTKSGEARGELFWDDGESLEVLERGAYTQVIFEARNNTIVNELVHVTSEGAGLQLGKVTVLGVATAPQQVLSNGRPVSNFTYSPDTKVLDICVALLMGEQFLVSWC

SEQ ID NO: 649 - DNA, 2832 bp, synthetic construct
  misc_feature 1..2832: note = Variant of the Homo Sapiens Lysosomal alpha-glucosidase
  source 1..2832: mol_type = other DNA
atggaatggagctgggtctttctcttcttcctgtcagtaacgactggtgtccactccggacacattctgtggcatgatttttctaccgtgcctagagagctttccggttcaagtcaagtcctcgaagaaacacatccagcccatcaggttggcgcatctaggccgggccctcgggacgctcaactccacccagggagacctagggccgttcccactcagtgcgacgtgccagagaactcacgcttcgattgtgcacctgagaaggctatcacgcaagagcagtgcgaggcccgcggatgttgttacataccggctaaacaggggctgcagggtgcgcagatgggccaaccttggtgcttcttcccaccatcctatccgagttacaagctggagaatctctcccagtctgaaatgggatataccgcaacactgactcggaccaccccctccttctttcccaaagatatcttgactctgagacttgacgtaatgatggagacagaaaacaggctccactttaccattaaggaccctgccaatcgccgatacgaggtgcctctggaaacaccacacgtgcacagtagagctccatcacctctgtattctgtcgagttctccgaagagccgtttggcgttatcgtcaggaggcagctcgacgggcgagtgcttctgaacacgactgtggccccgttgttctttgcggatcagtttctgcaactgtcaacaagtctcccttctcagtacattaccgggcttgcagagcatctgtccccactcatgctgagtacttcatggaacaaaatcacactgtggaatagagaccttgctcctactccaggagccaacttgtatggttctcaccctttctacttggccctggaagatggcggatcagcgcatggcgtattcctcctgaattccaacgcaatggacgttgttcttcagccatctcctgctttgagttggagatctacaggcgggatactggacgtctacatctttctgggtccagagcctaaatccgtagtgcagcagtatcttgatgtcgtcggatacccgtttatgccaccatattggggcctggggttccacttgtgccgctggggatattcatccaccgccattacacgacaagttgttgagaatatgaccagggcacattttcctctggatgtacagtggaacgacctggactacatggatagtcgccgcgacttcaccttcaataaggatgggttcagagactttcctgctatggtccaagaacttcaccagggaggcaggaggtacatgatgatcgtagatccgggaatttcttcttctggcccagccggttcatacagaccgtatgacgaaggactgcgacgaggcgtctttatcacgaacgagactggtcagcctttgataggcaaggtttggccagggtccaccgctttcccggatttcacaaatcctgaggcactggcctggtgggaagatatggtcgccgagtttcacgaccaggtcccatttgacgggatgtggatcgacatgaacgagccatccaacttcattagaggaagtgtggatggctgtccgaataatgagctggaaaaccctccttacgtaccaggcgttgttggtgggactcttcaagctgcgacgatttgcgcatcctcccatcagttcctgtcaacccactataacttgcacaatctgtacgggacaacagaggctatcgccagtcatagggccctggtaaaagctagaggaacacgccctttcgttatctctcgctcaacttttgcaggccacggtaggtatgccggacattggaccggcgacgtctggagttcttgggaacagctggcttcctccgttccagagatattgcagtttaacctgttgggagtcccacttgtaggtgcagatgtttgtggcttcctggggaacacctcagaagaattgtgcgtaagatggactcaactgggcgccttctacccttttatgcgcaatcacaactcactgacatctttgcctcaagaaccgtactcatttagtgagccagcacagcaggccatgaggaaggctcttggcctgagatatgcacttctgccgcatctgtacacccttttccaccaggctcatgtccatggagagactgttgcacgacctctgttcttggagttcccaaaagactcttccacgtggacagtcgatcaccagatgctgtggggcgaggctctgctgattacacctgtattgcaacctggtaaggccgaagttaccgggtactttccattggggacctggtatgatctgcaaacagtcccggttgaagctcttggaagtcttccacctccacctgctgcaccaagggagcctgcgatccactctgaaggacagtgggtaactttgcctgcaccgctggacaccatcaatgtccatctgcgcgaaggctacatcataccacttcaaggtcctggactgaccactacagagtctagaaaacaaccaatggctcttgctgttgcactgactaaaagcggcgaagcaaggggtgagctgttctgggacgacggagagtcactggaggtactcgaacgaggcgcgtatacgcaggtcatttttgaggctcgcaataatacgatcgttaacgagctggtccacgtcacttcagaaggtgcaggccttcagttgaataaggtaactgtcctgggagttgctacagcaccgcagcaggtcttgtccaacggacggcccgtaagcaactttacctatagtcctgataccaaagttctggacatctgcgttgctctgctgatgggtgagcagttcctggtatcatggtgc

SEQ ID NO: 650 - protein, 944 aa, synthetic construct
  REGION 1..944: note = Variant of the Homo Sapiens Lysosomal alpha-glucosidase
MEWSWVFLFFLSVTTGVHSGHILWHDFSTVPRELSGSSQVLEETHPAHQVGASRPGPRDAQLHPGRPRAVPTQCDVPENSRFDCAPEKAITQEQCEARGCCYIPAKQGLQGAQMGQPWCFFPPSYPSYKLENLSQSEMGYTATLTRTTPSFFPKDILTLRLDVMMETENRLHFTIKDPANRRYEVPLETPHVHSRAPSPLYSVEFSEEPFGVIVRRQLDGRVLLNTTVAPLFFADQFLQLSTSLPSQYITGLAEHLSPLMLSTSWNKITLWNRDLAPTPGANLYGSHPFYLALEDGGSAHGVFLLNSNAMDVVLQPSPALSWRSTGGILDVYIFLGPEPKSVVQQYLDVVGYPFMPPYWGLGFHLCRWGYSSTAITRQVVENMTRAHFPLDVQWNDLDYMDSRRDFTFNKDGFRDFPAMVQELHQGGRRYMMIVDPGISSSGPAGSYRPYDEGLRRGVFITNETGQPLIGKVWPGSTAFPDFTNPEALAWWEDMVAEFHDQVPFDGMWIDMNEPSNFIRGSVDGCPNNELENPPYVPGVVGGTLQAATICASSHQFLSTHYNLHNLYGTTEAIASHRALVKARGTRPFVISRSTFAGHGRYAGHWTGDVWSSWEQLASSVPEILQFNLLGVPLVGADVCGFLGNTSEELCVRWTQLGAFYPFMRNHNSLTSLPQEPYSFSEPAQQAMRKALGLRYALLPHLYTLFHQAHVHGETVARPLFLEFPKDSSTWTVDHQMLWGEALLITPVLQPGKAEVTGYFPLGTWYDLQTVPVEALGSLPPPPAAPREPAIHSEGQWVTLPAPLDTINVHLREGYIIPLQGPGLTTTESRKQPMALAVALTKSGEARGELFWDDGESLEVLERGAYTQVIFEARNNTIVNELVHVTSEGAGLQLNKVTVLGVATAPQQVLSNGRPVSNFTYSPDTKVLDICVALLMGEQFLVSWC

SEQ ID NO: 651 - DNA, 2832 bp, synthetic construct
  misc_feature 1..2832: note = Variant of the Homo Sapiens Lysosomal alpha-glucosidase
  source 1..2832: mol_type = other DNA
atggaatggagctgggtctttctcttcttcctgtcagtaacgactggtgtccactccggacacattctgtggcatgatttttctaccgtgcctagagagctttccggttcaagtcaagtcctcgaagaaacacatccagcccatcaggttggcgcatctaggccgggccctcgggacgctcaactccacccagggagacctagggccgttcccactcagtgcgacgtgccagagaactcacgcttcgattgtgcacctgagaaggctatcacgcaagagcagtgcgaggcccgcggatgttgttacataccggctaaacaggggctgcagggtgcgcagatgggccaaccttggtgcttcttcccaccatcctatccgagttacaagctggagaatctctcccagtctgaaatgggatataccgcaacactgactcggaccaccccctccttctttcccaaagatatcttgactctgagacttgacgtaatgatggagacagaaaacaggctccactttaccattaaggaccctgccaatcgccgatacgaggtgcctctggaaacaccacacgtgcacagtagagctccatcacctctgtattctgtcgagttctccgaagagccgtttggcgttatcgtcaggaggcagctcgacgggcgagtgcttctgaacacgactgtggccccgttgttctttgcggatcagtttctgcaactgtcaacaagtctcccttctcagtacattaccgggcttgcagagcatctgtccccactcatgctgagtacttcatggaacaaaatcacactgtggaatagagaccttgctcctactccaggagccaacttgtatggttctcaccctttctacttggccctggaagatggcggatcagcgcatggcgtattcctcctgaattccaacgcaatggacgttgttcttcagccatctcctgctttgagttggagatctacaggcgggatactggacgtctacatctttctgggtccagagcctaaatccgtagtgcagcagtatcttgatgtcgtcggatacccgtttatgccaccatattggggcctggggttccacttgtgccgctggggatattcatccaccgccattacacgacaagttgttgagaatatgaccagggcacattttcctctggatgtacagtggaacgacctggactacatggatagtcgccgcgacttcaccttcaataaggatgggttcagagactttcctgctatggtccaagaacttcaccagggaggcaggaggtacatgatgatcgtagatccgggaatttcttcttctggcccagccggttcatacagaccgtatgacgaaggactgcgacgaggcgtctttatcacgaacgagactggtcagcctttgataggcaaggtttggccagggtccaccgctttcccggatttcacaaatcctgaggcactggcctggtgggaagatatggtcgccgagtttcacgaccaggtcccatttgacgggatgtggatcgacatgaacgagccatccaacttcattagaggaagtgtggatggctgtccgaataatgagctggaaaaccctccttacgtaccaggcgttgttggtgggactcttcaagctgcgacgatttgcgcatcctcccatcagttcctgtcaacccactataacttgcacaatctgtacgggacaacagaggctatcgccagtcatagggccctggtaaaagctagaggaacacgccctttcgttatctctcgctcaacttttgcaggccacggtaggtatgccggacattggaccggcgacgtctggagttcttgggaacagctggcttcctccgttccagagatattgcagtttaacctgttgggagtcccacttgtaggtgcagatgtttgtggcttcctggggaacacctcagaagaattgtgcgtaagatggactcaactgggcgccttctacccttttatgcgcaatcacaactcactgacatctttgcctcaagaaccgtactcatttagtgagccagcacagcaggccatgaggaaggctcttggcctgagatatgcacttctgccgcatctgtacacccttttccaccaggctcatgtccatggagagactgttgcacgacctctgttcttggagttcccaaaagactcttccacgtggacagtcgatcaccagatgctgtggggcgaggctctgctgattacacctgtattgcaacctggtaaggccgaagttaccgggtactttccattggggacctggtatgatctgcaaacagtcccggttgaagctcttggaagtcttccacctccacctgctgcaccaagggagcctgcgatccactctgaaggacagtgggtaactttgcctgcaccgctggacaccatcaatgtccatctgcgcgaaggctacatcataccacttcaaggtcctggactgaccactacagagtctagaaaacaaccaatggctcttgctgttgcactgactaaaagcggcgaagcaaggggtgagctgttctgggacgacggagagtcactggaggtactcgaacgaggcgcgtatacgcaggtcatttttgaggctcgcaataatacgatcgttaacgagctggtccacgtcacttcagaaggtgcaggccttcagttgggcaaggtaactgtcctgggagttgctacagcaccgcagcaggtcttgtccaacggacggcccgtaagcaactttacctatagtcctgataccaaagttctggacatctgcgttggactgctgatgggtgagcagttcctggtatcatggtgc

SEQ ID NO: 652 - protein, 944 aa, synthetic construct
  REGION 1..944: note = Variant of the Homo Sapiens Lysosomal alpha-glucosidase
MEWSWVFLFFLSVTTGVHSGHILWHDFSTVPRELSGSSQVLEETHPAHQVGASRPGPRDAQLHPGRPRAVPTQCDVPENSRFDCAPEKAITQEQCEARGCCYIPAKQGLQGAQMGQPWCFFPPSYPSYKLENLSQSEMGYTATLTRTTPSFFPKDILTLRLDVMMETENRLHFTIKDPANRRYEVPLETPHVHSRAPSPLYSVEFSEEPFGVIVRRQLDGRVLLNTTVAPLFFADQFLQLSTSLPSQYITGLAEHLSPLMLSTSWNKITLWNRDLAPTPGANLYGSHPFYLALEDGGSAHGVFLLNSNAMDVVLQPSPALSWRSTGGILDVYIFLGPEPKSVVQQYLDVVGYPFMPPYWGLGFHLCRWGYSSTAITRQVVENMTRAHFPLDVQWNDLDYMDSRRDFTFNKDGFRDFPAMVQELHQGGRRYMMIVDPGISSSGPAGSYRPYDEGLRRGVFITNETGQPLIGKVWPGSTAFPDFTNPEALAWWEDMVAEFHDQVPFDGMWIDMNEPSNFIRGSVDGCPNNELENPPYVPGVVGGTLQAATICASSHQFLSTHYNLHNLYGTTEAIASHRALVKARGTRPFVISRSTFAGHGRYAGHWTGDVWSSWEQLASSVPEILQFNLLGVPLVGADVCGFLGNTSEELCVRWTQLGAFYPFMRNHNSLTSLPQEPYSFSEPAQQAMRKALGLRYALLPHLYTLFHQAHVHGETVARPLFLEFPKDSSTWTVDHQMLWGEALLITPVLQPGKAEVTGYFPLGTWYDLQTVPVEALGSLPPPPAAPREPAIHSEGQWVTLPAPLDTINVHLREGYIIPLQGPGLTTTESRKQPMALAVALTKSGEARGELFWDDGESLEVLERGAYTQVIFEARNNTIVNELVHVTSEGAGLQLGKVTVLGVATAPQQVLSNGRPVSNFTYSPDTKVLDICVGLLMGEQFLVSWC

SEQ ID NO: 653 - DNA, 2832 bp, synthetic construct
  misc_feature 1..2832: note = Variant of the Homo Sapiens Lysosomal alpha-glucosidase
  source 1..2832: mol_type = other DNA
atggaatggagctgggtctttctcttcttcctgtcagtaacgactggtgtccactccggacacattctgtggcatgatttttctaccgtgcctagagagctttccggttcaagtcaagtcctcgaagaaacacatccagcccatcaggttggcgcatctaggccgggccctcgggacgctcaactccacccagggagacctagggccgttcccactcagtgcgacgtgccagagaactcacgcttcgattgtgcacctgagaaggctatcacgcaagagcagtgcgaggcccgcggatgttgttacataccggctaaacaggggctgcagggtgcgcagatgggccaaccttggtgcttcttcccaccatcctatccgagttacaagctggagaatctctcccagtctgaaatgggatataccgcaacactgactcggaccaccccctccttctttcccaaagatatcttgactctgagacttgacgtaatgatggagacagaaaacaggctccactttaccattaaggaccctgccaatcgccgatacgaggtgcctctggaaacaccacacgtgcacagtagagctccatcacctctgtattctgtcgagttctccgaagagccgtttggcgttatcgtcaggaggcagctcgacgggcgagtgcttctgaacacgactgtggccccgttgttctttgcggatcagtttctgcaactgtcaacaagtctcccttctcagtacattaccgggcttgcagagcatctgtccccactcatgctgagtacttcatggaacaaaatcacactgtggaatagagaccttgctcctactccaggagccaacttgtatggttctcaccctttctacttggccctggaagatggcggatcagcgcatggcgtattcctcctgaattccaacgcaatggacgttgttcttcagccatctcctgctttgagttggagatctacaggcgggatactggacgtctacatctttctgggtccagagcctaaatccgtagtgcagcagtatcttgatgtcgtcggatacccgtttatgccaccatattggggcctggggttccacttgtgccgctggggatattcatccaccgccattacacgacaagttgttgagaatatgaccagggcacattttcctctggatgtacagtggaacgacctggactacatggatagtcgccgcgacttcaccttcaataaggatgggttcagagactttcctgctatggtccaagaacttcaccagggaggcaggaggtacatgatgatcgtagatccgggaatttcttcttctggcccagccggttcatacagaccgtatgacgaaggactgcgacgaggcgtctttatcacgaacgagactggtcagcctttgataggcaaggtttggccagggtccaccgctttcccggatttcacaaatcctgaggcactggcctggtgggaagatatggtcgccgagtttcacgaccaggtcccatttgacgggatgtggatcgacatgaacgagccatccaacttcattagaggaagtgtggatggctgtccgaataatgagctggaaaaccctccttacgtaccaggcgttgttggtgggactcttcaagctgcgacgatttgcgcatcctcccatcagttcctgtcaacccactataacttgcacaatctgtacgggacaacagaggctatcgccagtcatagggccctggtaaaagctagaggaacacgccctttcgttatctctcgctcaacttttgcaggccacggtaggtatgccggacattggaccggcgacgtctggagttcttgggaacagctggcttcctccgttccagagatattgcagtttaacctgttgggagtcccacttgtaggtgcagatgtttgtggcttcctggggaacacctcagaagaattgtgcgtaagatggactcaactgggcgccttctacccttttatgcgcaatcacaactcactgacatctttgcctcaagaaccgtactcatttagtgagccagcacagcaggccatgaggaaggctcttggcctgagatatgcacttctgccgcatctgtacacccttttccaccaggctcatgtcgatggagagactgttgcacgacctctgttcttggagttcccaaaagactcttccacgtggacagtcgatcaccagatgctgtggggcgaggctctgctgattacacctgtattgcaacctggtaaggccgaagttaccgggtactttccattggggacctggtatgatctgcaaacagtcccggttgaagctcttggaagtcttccacctccacctgctgcaccaagggagcctgcgatccactctgaaggacagtgggtaactttgcctgcaccgctggacaccatcaatgtccatctgcgcgaaggctacatcataccacttcaaggtcctggactgaccactacagagtctagaaaacaaccaatggctcttgctgttgcactgactaaaagcggcgaagcaaggggtgagctgttctgggacgacggagagtcactggaggtactcgaacgaggcgcgtatacgcaggtcatttttgaggctcgcaataatacgatcgttaacgagctggtccacgtcacttcagaaggtgcaggccttcagttgggcaaggtaactgtcctgggagttgctacagcaccgcagcaggtcttgtccaacggacggcccgtaagcaactttacctatagtcctgataccaaagttctggacatctgcgttgctctgctgatgggtgagcagttcctggtatcatggtgc

SEQ ID NO: 654 - protein, 944 aa, synthetic construct
  REGION 1..944: note = Variant of the Homo Sapiens Lysosomal alpha-glucosidase
MEWSWVFLFFLSVTTGVHSGHILWHDFSTVPRELSGSSQVLEETHPAHQVGASRPGPRDAQLHPGRPRAVPTQCDVPENSRFDCAPEKAITQEQCEARGCCYIPAKQGLQGAQMGQPWCFFPPSYPSYKLENLSQSEMGYTATLTRTTPSFFPKDILTLRLDVMMETENRLHFTIKDPANRRYEVPLETPHVHSRAPSPLYSVEFSEEPFGVIVRRQLDGRVLLNTTVAPLFFADQFLQLSTSLPSQYITGLAEHLSPLMLSTSWNKITLWNRDLAPTPGANLYGSHPFYLALEDGGSAHGVFLLNSNAMDVVLQPSPALSWRSTGGILDVYIFLGPEPKSVVQQYLDVVGYPFMPPYWGLGFHLCRWGYSSTAITRQVVENMTRAHFPLDVQWNDLDYMDSRRDFTFNKDGFRDFPAMVQELHQGGRRYMMIVDPGISSSGPAGSYRPYDEGLRRGVFITNETGQPLIGKVWPGSTAFPDFTNPEALAWWEDMVAEFHDQVPFDGMWIDMNEPSNFIRGSVDGCPNNELENPPYVPGVVGGTLQAATICASSHQFLSTHYNLHNLYGTTEAIASHRALVKARGTRPFVISRSTFAGHGRYAGHWTGDVWSSWEQLASSVPEILQFNLLGVPLVGADVCGFLGNTSEELCVRWTQLGAFYPFMRNHNSLTSLPQEPYSFSEPAQQAMRKALGLRYALLPHLYTLFHQAHVDGETVARPLFLEFPKDSSTWTVDHQMLWGEALLITPVLQPGKAEVTGYFPLGTWYDLQTVPVEALGSLPPPPAAPREPAIHSEGQWVTLPAPLDTINVHLREGYIIPLQGPGLTTTESRKQPMALAVALTKSGEARGELFWDDGESLEVLERGAYTQVIFEARNNTIVNELVHVTSEGAGLQLGKVTVLGVATAPQQVLSNGRPVSNFTYSPDTKVLDICVALLMGEQFLVSWC

SEQ ID NO: 655 - DNA, 2832 bp, synthetic construct
  misc_feature 1..2832: note = Variant of the Homo Sapiens Lysosomal alpha-glucosidase
  source 1..2832: mol_type = other DNA
atggaatggagctgggtctttctcttcttcctgtcagtaacgactggtgtccactccggacacattctgtggcatgatttttctaccgtgcctagagagctttccggttcaagtcaagtcctcgaagaaacacatccagcccatcaggttggcgcatctaggccgggccctcgggacgctcaactccacccagggagacctagggccgttcccactcagtgcgacgtgccagagaactcacgcttcgattgtgcacctgagaaggctatcacgcaagagcagtgcgaggcccgcggatgttgttacataccggctaaacaggggctgcagggtgcgcagatgggccaaccttggtgcttcttcccaccatcctatccgagttacaagctggagaatctctcccagtctgaaatgggatataccgcaacactgactcggaccaccccctccttctttcccaaagatatcttgactctgagacttgacgtaatgatggagacagaaaacaggctccactttaccattaaggaccctgccaatcgccgatacgaggtgcctctggaaacaccacacgtgcacagtagagctccatcacctctgtattctgtcgagttctccgaagagccgtttggcgttatcgtcaggaggcagctcgacgggcgagtgcttctgaacacgactgtggccccgttgttctttgcggatcagtttctgcaactgtcaacaagtctcccttctcagtacattaccgggcttgcagagcatctgtccccactcatgctgagtacttcatggaccaaaatcacactgtggaatagagaccttgctcctactccaggagccaacttgtatggttctcaccctttctacttggccctggaagatggcggatcagcgcatggcgtattcctcctgaattccaacgcaatggacgttgttcttcagccatctcctgctttgagttggagatctacaggcgggatactggacgtctacatctttctgggtccagagcctaaatccgtagtgcagcagtatcttgatgtcgtcggatacccgtttatgccaccatattggggcctggggttccacttgtgccgctggggatattcatccaccgccattacacgacaagttgttgagaatatgaccagggcacattttcctctggatgtacagtggaacgacctggactacatggatagtcgccgcgacttcaccttcaataaggatgggttcagagactttcctgctatggtccaagaacttcaccagggaggcaggaggtacatgatgatcgtagatccgggaatttcttcttctggcccagccggttcatacagaccgtatgacgaaggactgcgacgaggcgtctttatcacgaacgagactggtcagcctttgataggcaaggtttggccagggtccaccgctttcccggatttcacaaatcctgaggcactggcctggtgggaagatatggtcgccgagtttcacgaccaggtcccatttgacgggatgtggatcgacatgaacgagccatccaacttcattagaggaagtgtggatggctgtccgaataatgagctggaaaaccctccttacgtaccaggcgttgttggtgggactcttcaagctgcgacgatttgcgcatcctcccatcagttcctgtcaacccactataacttgcacaatctgtacgggacaacagaggctatcgccagtcatagggccctggtaaaagctagaggaacacgccctttcgttatctctcgctcaacttttgcaggccacggtaggtatgccggacattggaccggcgacgtctggagttcttgggaacagctggcttcctccgttccagagatattgcagtttaacctgttgggagtcccacttgtaggtgcagatgtttgtggcttcctggggaacacctcagaagaattgtgcgtaagatggactcaactgggcgccttctacccttttatgcgcaatcacaactcactgacatctttgcctcaagaaccgtactcatttagtgagccagcacagcaggccatgaggaaggctcttggcctgagatatgcacttctgccgcatctgtacacccttttccaccaggctcatgtccatggagagactgttgcacgacctctgttcttggagttcccaaaagactcttccacgtggacagtcgatcaccagatgctgtggggcgaggctctgctgattacacctgtattgcaacctggtaaggccgaagttaccgggtactttccattggggacctggtatgatctgcaaacagtcccggttgaagctcttggaagtcttccacctccacctgctgcaccaagggagcctgcgatccactctgaaggacagtgggtaactttgcctgcaccgctggacaccatcaatgtccatctgcgcgaaggctacatcataccacttcaaggtcctggactgaccactacagagtctagaaaacaaccaatggctcttgctgttgcactgactaaaagcggcgaagcaaggggtgagctgttctgggacgacggagagtcactggaggtactcgaacgaggcgcgtatacgcaggtcatttttgaggctcgcaataatacgatcgttaacgagctggtccacgtcacttcagaaggtgcaggccttcagttgggcaaggtaactgtcctgggagttgctacagcaccgcagcaggtcttgtccaacggacggcccgtaagcaactttacctatagtcctgataccaaagttctggacatctgcgttgctctgctgatgggtgagcagttcctggtatcatggtgc

SEQ ID NO: 656 - protein, 944 aa, synthetic construct
  REGION 1..944: note = Variant of the Homo Sapiens Lysosomal alpha-glucosidase
MEWSWVFLFFLSVTTGVHSGHILWHDFSTVPRELSGSSQVLEETHPAHQVGASRPGPRDAQLHPGRPRAVPTQCDVPENSRFDCAPEKAITQEQCEARGCCYIPAKQGLQGAQMGQPWCFFPPSYPSYKLENLSQSEMGYTATLTRTTPSFFPKDILTLRLDVMMETENRLHFTIKDPANRRYEVPLETPHVHSRAPSPLYSVEFSEEPFGVIVRRQLDGRVLLNTTVAPLFFADQFLQLSTSLPSQYITGLAEHLSPLMLSTSWTKITLWNRDLAPTPGANLYGSHPFYLALEDGGSAHGVFLLNSNAMDVVLQPSPALSWRSTGGILDVYIFLGPEPKSVVQQYLDVVGYPFMPPYWGLGFHLCRWGYSSTAITRQVVENMTRAHFPLDVQWNDLDYMDSRRDFTFNKDGFRDFPAMVQELHQGGRRYMMIVDPGISSSGPAGSYRPYDEGLRRGVFITNETGQPLIGKVWPGSTAFPDFTNPEALAWWEDMVAEFHDQVPFDGMWIDMNEPSNFIRGSVDGCPNNELENPPYVPGVVGGTLQAATICASSHQFLSTHYNLHNLYGTTEAIASHRALVKARGTRPFVISRSTFAGHGRYAGHWTGDVWSSWEQLASSVPEILQFNLLGVPLVGADVCGFLGNTSEELCVRWTQLGAFYPFMRNHNSLTSLPQEPYSFSEPAQQAMRKALGLRYALLPHLYTLFHQAHVHGETVARPLFLEFPKDSSTWTVDHQMLWGEALLITPVLQPGKAEVTGYFPLGTWYDLQTVPVEALGSLPPPPAAPREPAIHSEGQWVTLPAPLDTINVHLREGYIIPLQGPGLTTTESRKQPMALAVALTKSGEARGELFWDDGESLEVLERGAYTQVIFEARNNTIVNELVHVTSEGAGLQLGKVTVLGVATAPQQVLSNGRPVSNFTYSPDTKVLDICVALLMGEQFLVSWC

SEQ ID NO: 657 - DNA, 2832 bp, synthetic construct
  misc_feature 1..2832: note = Variant of the Homo Sapiens Lysosomal alpha-glucosidase
  source 1..2832: mol_type = other DNA
atggaatggagctgggtctttctcttcttcctgtcagtaacgactggtgtccactccggacacattctgtggcatgatttttctaccgtgcctagagagctttccggttcaagtcaagtcctcgaagaaacacatccagcccatcaggttggcgcatctaggccgggccctcgggacgctcaactccacccagggagacctagggccgttcccactcagtgcgacgtgccagagaactcacgcttcgattgtgcacctgagaaggctatcacgcaagagcagtgcgaggcccgcggatgttgttacataccggctaaacaggggctgcagggtgcgcagatgggccaaccttggtgcttcttcccaccatcctatccgagttacaagctggagaatctctcccagtctgaaatgggatataccgcaacactgactcggaccaccccctccttctttcccaaagatatcttgactctgagacttgacgtaatgatggagacagaaaacaggctccactttaccattaaggaccctgccaatcgccgatacgaggtgcctctggaaacaccacacgtgcacagtagagctccatcacctctgtattctgtcgagttctccgaagagccgtttggcgttatcgtcaggaggcagctcgacgggcgagtgcttctgaacacgactgtggccccgttgttctttgcggatcagtttctgcaactgtcaacaagtctcccttctcagtacattaccgggcttgcagagcatctgtccccactcatgctgagtacttcatggaacaaaatcacactgtggaatagagaccttgctcctactccaggagccaacttgtatggttctcaccctttctacttggccctggaagatggcggatcagcgcatggcgtattcctcctgaattccaacgcaatggacgttgttcttcagccatctcctgctttgagttggagatctacaggcgggatactggacgtctacatctttctgggtccagagcctaaatccgtagtgcagcagtatcttgatgtcgtcggatacccgtttatgccaccatattggggcctggggttccacttgtgccgctggggatattcatccaccgccattacacgacaagttgttgagaatatgaccagggcacattttcctctggatgtacagtggaacgacctggactacatggatagtcgccgcgacttcaccttcaataaggatgggttcagagactttcctgctatggtccaagaacttcaccagggaggcaggaggtacatgatgatcgtagatccgggaatttcttcttctggcccagccggttcatacagaccgtatgacgaaggactgcgacgaggcgtctttatcacgaacgagactggtcagcctttgataggcaaggtttggccagggtccaccgctttcccggatttcacaaatcctgaggcactggcctggtgggaagatatggtcgccgagtttcacgaccaggtcccatttgacgggatgtggatcgacatgaacgagccatccaacttcattagaggaagtgtggatggctgtccgaataatgagctggaaaaccctccttacgtaccaggcgttgttggtgggactcttcaagctgcgacgatttgcgcatcctcccatcagttcctgtcaacccactataacttgcacaatctgtacgggacaacagaggctatcgccagtcatagggccctggtaaaagctagaggaacacgccctttcgttatctctcgctcaacttttgcaggccacggtaggtatgccggacattggaccggcgacgtctggagttcttgggaacagctggcttcctccgttccagagatattgcagtttaacctgttgggagtcccacttgtaggtgcagatgtttgtggcttcctggggaacacctcagaagaattgtgcgtaagatggactcaactgggcgccttctacccttttatgcgcaatcacaactcactgacatctttgcctcaagaaccgtactcatttagtgagccagcacagcaggccatgaggaaggctcttggcctgagatatgcacttctgccgcatctgtacacccttttccaccaggctcatgtccatggagagactgttgcacgacctctgttcttggagttcccaaaagactcttccacgtggacagtcgatcaccagatgctgtggggcgaggctctgctgattacacctgtattgcaacctggtaaggccgaagttaccgggtactttccattggggacctggtatgatctgcaaacagtcccggttgaagctcttggaagtcttccacctccacctgctgcaccaagggagcctgcgatccactctgaaggacagtgggtaactttgcctgcaccgctggacaccatcaatgtccatctgcgcgaaggctacatcataccacttcaaggtcctggactgaccactacagagtctagaaaacaaccaatggctcttgctgttgcactgactaaaagcggcgaagcaaggggtgagctgttctgggacgacggagagtcactggaggtactcgaacgaggcgcgtatacgcaggtcatttttcacgctcgcaataatacgatcgttaacgagctggtccacgtcacttcagaaggtgcaggccttcagttgggcaaggtaactgtcctgggagttgctacagcaccgcagcaggtcttgtccaacggacggcccgtaagcaactttacctatagtcctgataccaaagttctggacatctgcgttgctctgctgatgggtgagcagttcctggtatcatggtgc

SEQ ID NO: 658 - protein, 944 aa, synthetic construct
  REGION 1..944: note = Variant of the Homo Sapiens Lysosomal alpha-glucosidase
MEWSWVFLFFLSVTTGVHSGHILWHDFSTVPRELSGSSQVLEETHPAHQVGASRPGPRDAQLHPGRPRAVPTQCDVPENSRFDCAPEKAITQEQCEARGCCYIPAKQGLQGAQMGQPWCFFPPSYPSYKLENLSQSEMGYTATLTRTTPSFFPKDILTLRLDVMMETENRLHFTIKDPANRRYEVPLETPHVHSRAPSPLYSVEFSEEPFGVIVRRQLDGRVLLNTTVAPLFFADQFLQLSTSLPSQYITGLAEHLSPLMLSTSWNKITLWNRDLAPTPGANLYGSHPFYLALEDGGSAHGVFLLNSNAMDVVLQPSPALSWRSTGGILDVYIFLGPEPKSVVQQYLDVVGYPFMPPYWGLGFHLCRWGYSSTAITRQVVENMTRAHFPLDVQWNDLDYMDSRRDFTFNKDGFRDFPAMVQELHQGGRRYMMIVDPGISSSGPAGSYRPYDEGLRRGVFITNETGQPLIGKVWPGSTAFPDFTNPEALAWWEDMVAEFHDQVPFDGMWIDMNEPSNFIRGSVDGCPNNELENPPYVPGVVGGTLQAATICASSHQFLSTHYNLHNLYGTTEAIASHRALVKARGTRPFVISRSTFAGHGRYAGHWTGDVWSSWEQLASSVPEILQFNLLGVPLVGADVCGFLGNTSEELCVRWTQLGAFYPFMRNHNSLTSLPQEPYSFSEPAQQAMRKALGLRYALLPHLYTLFHQAHVHGETVARPLFLEFPKDSSTWTVDHQMLWGEALLITPVLQPGKAEVTGYFPLGTWYDLQTVPVEALGSLPPPPAAPREPAIHSEGQWVTLPAPLDTINVHLREGYIIPLQGPGLTTTESRKQPMALAVALTKSGEARGELFWDDGESLEVLERGAYTQVIFHARNNTIVNELVHVTSEGAGLQLGKVTVLGVATAPQQVLSNGRPVSNFTYSPDTKVLDICVALLMGEQFLVSWC

SEQ ID NO: 659 - DNA, 2832 bp, synthetic construct
  misc_feature 1..2832: note = Variant of the Homo Sapiens Lysosomal alpha-glucosidase
  source 1..2832: mol_type = other DNA
atggaatggagctgggtctttctcttcttcctgtcagtaacgactggtgtccactccggacacattctgtggcatgatttttctaccgtgcctagagagctttccggttcaagtcaagtcctcgaagaaacacatccagcccatcaggttggcgcatctaggccgggccctcgggacgctcaactccacccagggagacctagggccgttcccactcagtgcgacgtgccagagaactcacgcttcgattgtgcacctgagaaggctatcacgcaagagcagtgcgaggcccgcggatgttgttacataccggctaaacaggggctgcagggtgcgcagatgggccaaccttggtgcttcttcccaccatcctatccgagttacaagctggagaatctctcccagtctgaaatgggatataccgcaacactgactcggaccaccccctccttctttcccaaagatatcttgactctgagacttgacgtaatgatggagacagaaaacaggctccactttaccattaaggaccctgccaatcgccgatacgaggtgcctctggaaacaccacacgtgcacagtagagctccatcacctctgtattctgtcgagttctccgaagagccgtttggcgttatcgtcaggaggcagctcgacgggcgagtgcttctgaacacgactgtggccccgttgttctttgcggatcagtttctgcaactgtcaacaagtctcccttctcagtacattaccgggcttgcagagcatctgtccccactcatgctgagtacttcatggaacaaaatcacactgtggaatagagaccttgctcctactccaggagccaacttgtatggttctcaccctttctacttggccctggaagatggcggatcagcgcatggcgtattcctcctgaattccaacgcaatggacgttgttcttcagccatctcctgctttgagttggagatctacaggcgggatactggacgtctacatctttctgggtccagagcctaaatccgtagtgcagcagtatcttgatgtcgtcggatacccgtttatgccaccatattggggcctggggttccacttgtgccgctggggatattcatccaccgccattacacgacaagttgttgagaatatgaccagggcacattttcctctggatgtacagtggaacgacctggactacatggatagtcgccgcgacttcaccttcaataaggatgggttcagagactttcctgctatggtccaagaacttcaccagggaggcaggaggtacatgatgatcgtagatccgggaatttcttcttctggcccagccggttcatacagaccgtatgacgaaggactgcgacgaggcgtctttatcacgaacgagactggtcagcctttgataggcaaggtttggccagggtccaccgctttcccggatttcacaaatcctcatgcactggcctggtgggaagatatggtcgccgagtttcacgaccaggtcccatttgacgggatgtggatcgacatgaacgagccatccaacttcattagaggaagtgtggatggctgtccgaataatgagctggaaaaccctccttacgtaccaggcgttgttggtgggactcttcaagctgcgacgatttgcgcatcctcccatcagttcctgtcaacccactataacttgcacaatctgtacgggacaacagaggctatcgccagtcatagggccctggtaaaagctagaggaacacgccctttcgttatctctcgctcaacttttgcaggccacggtaggtatgccggacattggaccggcgacgtctggagttcttgggaacagctggcttcctccgttccagagatattgcagtttaacctgttgggagtcccacttgtaggtgcagatgtttgtggcttcctggggaacacctcagaagaattgtgcgtaagatggactcaactgggcgccttctacccttttatgcgcaatcacaactcactgacatctttgcctcaagaaccgtactcatttagtgagccagcacagcaggccatgaggaaggctcttggcctgagatatgcacttctgccgcatctgtacacccttttccaccaggctcatgtccatggagagactgttgcacgacctctgttcttggagttcccaaaagactcttccacgtggacagtcgatcaccagatgctgtggggcgaggctctgctgattacacctgtattgcaacctggtaaggccgaagttaccgggtactttccattggggacctggtatgatctgcaaacagtcccggttgaagctcttggaagtcttccacctccacctgctgcaccaagggagcctgcgatccactctgaaggacagtgggtaactttgcctgcaccgctggacaccatcaatgtccatctgcgcgaaggctacatcataccacttcaaggtcctggactgaccactacagagtctagaaaacaaccaatggctcttgctgttgcactgactaaaagcggcgaagcaaggggtgagctgttctgggacgacggagagtcactggaggtactcgaacgaggcgcgtatacgcaggtcatttttgaggctcgcaataatacgatcgttaacgagctggtccacgtcacttcagaaggtgcaggccttcagttgggcaaggtaactgtcctgggagttgctacagcaccgcagcaggtcttgtccaacggacggcccgtaagcaactttacctatagtcctgataccaaagttctggacatctgcgttgctctgctgatgggtgagcagttcctggtatcatggtgc

SEQ ID NO: 660 - protein, 944 aa, synthetic construct
  REGION 1..944: note = Variant of the Homo Sapiens Lysosomal alpha-glucosidase
MEWSWVFLFFLSVTTGVHSGHILWHDFSTVPRELSGSSQVLEETHPAHQVGASRPGPRDAQLHPGRPRAVPTQCDVPENSRFDCAPEKAITQEQCEARGCCYIPAKQGLQGAQMGQPWCFFPPSYPSYKLENLSQSEMGYTATLTRTTPSFFPKDILTLRLDVMMETENRLHFTIKDPANRRYEVPLETPHVHSRAPSPLYSVEFSEEPFGVIVRRQLDGRVLLNTTVAPLFFADQFLQLSTSLPSQYITGLAEHLSPLMLSTSWNKITLWNRDLAPTPGANLYGSHPFYLALEDGGSAHGVFLLNSNAMDVVLQPSPALSWRSTGGILDVYIFLGPEPKSVVQQYLDVVGYPFMPPYWGLGFHLCRWGYSSTAITRQVVENMTRAHFPLDVQWNDLDYMDSRRDFTFNKDGFRDFPAMVQELHQGGRRYMMIVDPGISSSGPAGSYRPYDEGLRRGVFITNETGQPLIGKVWPGSTAFPDFTNPHALAWWEDMVAEFHDQVPFDGMWIDMNEPSNFIRGSVDGCPNNELENPPYVPGVVGGTLQAATICASSHQFLSTHYNLHNLYGTTEAIASHRALVKARGTRPFVISRSTFAGHGRYAGHWTGDVWSSWEQLASSVPEILQFNLLGVPLVGADVCGFLGNTSEELCVRWTQLGAFYPFMRNHNSLTSLPQEPYSFSEPAQQAMRKALGLRYALLPHLYTLFHQAHVHGETVARPLFLEFPKDSSTWTVDHQMLWGEALLITPVLQPGKAEVTGYFPLGTWYDLQTVPVEALGSLPPPPAAPREPAIHSEGQWVTLPAPLDTINVHLREGYIIPLQGPGLTTTESRKQPMALAVALTKSGEARGELFWDDGESLEVLERGAYTQVIFEARNNTIVNELVHVTSEGAGLQLGKVTVLGVATAPQQVLSNGRPVSNFTYSPDTKVLDICVALLMGEQFLVSWC

SEQ ID NO: 661 - DNA, 2832 bp, synthetic construct
  misc_feature 1..2832: note = Variant of the Homo Sapiens Lysosomal alpha-glucosidase
  source 1..2832: mol_type = other DNA
atggaatggagctgggtctttctcttcttcctgtcagtaacgactggtgtccactccggacacattctgtggcatgatttttctaccgtgcctagagagctttccggttcaagtcaagtcctcgaagaaacacatccagcccatcaggttggcgcatctaggccgggccctcgggacgctcaactccacccagggagacctagggccgttcccactcagtgcgacgtgccagagaactcacgcttcgattgtgcacctgagaaggctatcacgcaagagcagtgcgaggcccgcggatgttgttacataccggctaaacaggggctgcagggtgcgcagatgggccaaccttggtgcttcttcccaccatcctatccgagttacaagctggagaatctctcccagtctgaaatgggatataccgcaacactgactcggaccaccccctccttctttcccaaagatatcttgactctgagacttgacgtaatgatggagacagaaaacaggctccactttaccattaaggaccctgccaatcgccgatacgaggtgcctctggaaacaccacacgtgcacagtagagctccatcacctctgtattctgtcgagttctccgaagagccgtttggcgttatcgtcaggaggcagctcgacgggcgagtgcttctgaacacgactgtggccccgttgttctttgcggatcagtttctgcaactgtcaacaagtctcccttctcagtacattaccgggcttgcagagcatctgtccccactcatgctgagtacttcatggaacaaaatcacactgtggaatagagaccttgctcctactccaggagccaacttgtatggttctcaccctttctacttggccctggaagatggcggatcagcgcatggcgtattcctcctgaattccaacgcaatggacgttgttcttcagccatctcctgctttgagttggagatctacaggcgggatactggacgtctacatctttctgggtccagagcctaaatccgtagtgcagcagtatcttgatgtcgtcggatacccgtttatgccaccatattggggcctggggttccacttgtgccgctggggatattcatccaccgccattacacgacaagttgttgagaatatgaccagggcacattttcctctggatgtacagtggaacgacctggactacatggatagtcgccgcgacttcaccttcaataaggatgggttcagagactttcctgctatggtccaagaacttcaccagggaggcaggaggtacatgatgatcgtagatccgggaatttcttcttctggcccagccggttcatacagaccgtatgacgaaggactgcgacgaggcgtctttatcacgaacgagactggtcagcctttgataggcaaggtttggccagggtccaccgctttcccggatttcacaaatcctgaggcactggcctggtgggaagatatggtcgccgagtttcacgaccaggtcccatttgacgggatgtggatcgacatgaacgagccatccaacttcattagaggaagtgtggatggctgtccgaataatgagctggaaaaccctccttacgtaccaggcgttgttggtgggactcttcaagctgcgacgatttgcgcatcctcccatcagttcctgtcaacccactataacttgcacaatctgtacgggacaacagaggctatcgccagtcatagggccctggtaaaagctagaggaacacgccctttcgttatctctcgctcaacttttgcaggccacggtaggtatgccggacattggaccggcgacgtctggagttcttgggaacagctggcttcctccgttccagagatattgcagtttaacctgttgggagtcccacttgtaggtgcagatgtttgtggcttcctggggaacacctcagaagaattgtgcgtaagatggactcaactgggcgccttctacccttttatgcgcaatcacaactcactgacatctttgcctcaagaaccgtactcatttagtgagccagcacagcaggccatgaggaaggctcttggcctgagatatgcacttctgccgcatctgtacacccttttccaccaggctcatgtccatggagagactgttgcacgacctctgttcttggagttcccaaaagactcttccacgtggacagtcgatcaccagatgctgtggggcgaggctctgctgattacacctgtattgcaacctggtaaggccgaagttaccgggtactttccattggggacctggtatgatctgcaaacagtcccggttgaagctcttggaagtcttccacctccacctgctgcaccaagggagcctgcgatccactctgaaggacagtgggtaactttgcctgcaccgctggacaccatcaatgtccatctgcgcgaaggctacatcataccacttcaaggtcctggactgaccactacagagtctagaaaacaaccaatggctcttgctgttgcactgactaaaagcggcgaagcaaggggtgagctgttctgggacgacggagagtcactggaggtactcgaacgaggcgcgtatacgcaggtcatttttgaggctcgcaataatacgatcgttaacgagctggtccacgtcacttcagaaggtgcaggccttcagttgggcaaggtaactgtcctgggagttgctacagcaccgcagcaggtcttgtccaacggaaagcccgtaagcaactttacctatagtcctgataccaaagttctggacatctgcgttgctctgctgatgggtgagcagttcctggtatcatggtgc

SEQ ID NO: 662 - protein, 944 aa, synthetic construct
  REGION 1..944: note = Variant of the Homo Sapiens Lysosomal alpha-glucosidase
MEWSWVFLFFLSVTTGVHSGHILWHDFSTVPRELSGSSQVLEETHPAHQVGASRPGPRDAQLHPGRPRAVPTQCDVPENSRFDCAPEKAITQEQCEARGCCYIPAKQGLQGAQMGQPWCFFPPSYPSYKLENLSQSEMGYTATLTRTTPSFFPKDILTLRLDVMMETENRLHFTIKDPANRRYEVPLETPHVHSRAPSPLYSVEFSEEPFGVIVRRQLDGRVLLNTTVAPLFFADQFLQLSTSLPSQYITGLAEHLSPLMLSTSWNKITLWNRDLAPTPGANLYGSHPFYLALEDGGSAHGVFLLNSNAMDVVLQPSPALSWRSTGGILDVYIFLGPEPKSVVQQYLDVVGYPFMPPYWGLGFHLCRWGYSSTAITRQVVENMTRAHFPLDVQWNDLDYMDSRRDFTFNKDGFRDFPAMVQELHQGGRRYMMIVDPGISSSGPAGSYRPYDEGLRRGVFITNETGQPLIGKVWPGSTAFPDFTNPEALAWWEDMVAEFHDQVPFDGMWIDMNEPSNFIRGSVDGCPNNELENPPYVPGVVGGTLQAATICASSHQFLSTHYNLHNLYGTTEAIASHRALVKARGTRPFVISRSTFAGHGRYAGHWTGDVWSSWEQLASSVPEILQFNLLGVPLVGADVCGFLGNTSEELCVRWTQLGAFYPFMRNHNSLTSLPQEPYSFSEPAQQAMRKALGLRYALLPHLYTLFHQAHVHGETVARPLFLEFPKDSSTWTVDHQMLWGEALLITPVLQPGKAEVTGYFPLGTWYDLQTVPVEALGSLPPPPAAPREPAIHSEGQWVTLPAPLDTINVHLREGYIIPLQGPGLTTTESRKQPMALAVALTKSGEARGELFWDDGESLEVLERGAYTQVIFEARNNTIVNELVHVTSEGAGLQLGKVTVLGVATAPQQVLSNGKPVSNFTYSPDTKVLDICVALLMGEQFLVSWC

SEQ ID NO: 663 - DNA, 2832 bp, synthetic construct
  misc_feature 1..2832: note = Variant of the Homo Sapiens Lysosomal alpha-glucosidase
  source 1..2832: mol_type = other DNA
atggaatggagctgggtctttctcttcttcctgtcagtaacgactggtgtccactccggacacattctgtggcatgatttttctaccgtgcctagagagctttccggttcaagtcaagtcctcgaagaaacacatccagcccatcaggttggcgcatctaggccgggccctcgggacgctcaactccacccagggagacctagggccgttcccactcagtgcgacgtgccagagaactcacgcttcgattgtgcacctgagaaggctatcacgcaagagcagtgcgaggcccgcggatgttgttacataccggctaaacaggggctgcagggtgcgcagatgggccaaccttggtgcttcttcccaccatcctatccgagttacaagctggagaatctctcccagtctgaaatgggatataccgcaacactgactcggaccaccccctccttctttcccaaagatatcttgactctgagacttgacgtaatgatggagacagaaaacaggctccactttaccattaaggaccctgccaatcgccgatacgaggtgcctctggaaacaccacacgtgcacagtagagctccatcacctctgtattctgtcgagttctccgaagagccgtttggcgttatcgtcaggaggcagctcgacgggcgagtgcttctgaacacgactgtggccccgttgttctttgcggatcagtttctgcaactgtcaacaagtctcccttctcagtacattaccgggcttgcagagcatctgtccccactcatgctgagtacttcatggaacaaaatcacactgtggaatagagaccttgctcctactccaggagccaacttgtatggttctcaccctttctacttggccctggaagatggcggatcagcgcatggcgtattcctcctgaattccaacgcaatggacgttgttcttcagccatctcctgctttgagttggagatctacaggcgggatactggacgtctacatctttctgggtccagagcctaaatccgtagtgcagcagtatcttgatgtcgtcggatacccgtttatgccaccatattggggcctggggttccacttgtgccgctggggatattcatccaccgccattacacgacaagttgttgagaatatgaccagggcacattttcctctggatgtacagtggaacgacctggactacatggatagtcgccgcgacttcaccttcaataaggatgggttcagagactttcctgctatggtccaagaacttcaccagggaggcaggaggtacatgatgatcgtagatccgggaatttcttcttctggcccagccggttcatacagaccgtatgacgaaggactgcgacgaggcgtctttatcacgaacgagactggtcagcctttgataggcaaggtttggccagggtccaccgctttcccggatttcacaaatcctgaggcactggcctggtgggaagatatggtcgccgagtttcacgaccaggtcccatttgacgggatgtggatcgacatgaacgagccatccaacttcattagaggaagtgtggatggctgtccgaataatgagctggaaaaccctccttacgtaccaggcgttgttggtgggactcttcaagctgcgacgatttgcgcatcctcccatcagttcctgtcaacccactataacttgcacaatctgtacgggacaacagaggctatcgccagtcatagggccctggtaaaagctagaggaacacgccctttcgttatctctcgctcaacttttgcaggccacggtaggtatgccggacattggaccggcgacgtctggagttcttgggaacagctggcttcctccgttccagagatattgcagtttaacctgttgggagtcccacttgtaggtgcagatgtttgtggcttcctggggaacacctcagaagaattgtgcgtaagatggactcaactgggcgccttctacccttttatgcgcaatcacaactcactgacatctttgcctcaagaaccgtactcatttagtgagccagcacagcaggccatgaggaaggctcttggcctgagatatgcacttctgccgcatctgtacacccttttccaccaggctcatgtccatggagagactgttgcacgacctctgttcttggagttcccaaaagactcttccacgtggacagtcgatcaccagatgctgtggggcgaggctctgctgattacacctgtattgcaacctggtaaggccgaagttaccgggtactttccattggggacctggtatgatctgcaaacagtcccggttgaagctcttggaagtcttccacctccacctgctgcaccaagggagcctgcgatccactctgaaggacagtgggtaactttgcctgcaccgctggacaccatcaatgtccatctgcgcgaaggctacatcataccacttcaaggtcctggactgaccactacagagtctagaaaacaaccaatggctcttgctgttgcactgactaaaagcggcgaagcaaggggtgagctgttctgggacgacggagagtcactggaggtactcgaacgaggcgcgtatacgcaggtcatttttatggctcgcaataatacgatcgttaacgagctggtccacgtcacttcagaaggtgcaggccttcagttgggcaaggtaactgtcctgggagttgctacagcaccgcagcaggtcttgtccaacggacggcccgtaagcaactttacctatagtcctgataccaaagttctggacatctgcgttgctctgctgatgggtgagcagttcctggtatcatggtgc

SEQ ID NO: 664 - protein, 944 aa, synthetic construct
  REGION 1..944: note = Variant of the Homo Sapiens Lysosomal alpha-glucosidase
MEWSWVFLFFLSVTTGVHSGHILWHDFSTVPRELSGSSQVLEETHPAHQVGASRPGPRDAQLHPGRPRAVPTQCDVPENSRFDCAPEKAITQEQCEARGCCYIPAKQGLQGAQMGQPWCFFPPSYPSYKLENLSQSEMGYTATLTRTTPSFFPKDILTLRLDVMMETENRLHFTIKDPANRRYEVPLETPHVHSRAPSPLYSVEFSEEPFGVIVRRQLDGRVLLNTTVAPLFFADQFLQLSTSLPSQYITGLAEHLSPLMLSTSWNKITLWNRDLAPTPGANLYGSHPFYLALEDGGSAHGVFLLNSNAMDVVLQPSPALSWRSTGGILDVYIFLGPEPKSVVQQYLDVVGYPFMPPYWGLGFHLCRWGYSSTAITRQVVENMTRAHFPLDVQWNDLDYMDSRRDFTFNKDGFRDFPAMVQELHQGGRRYMMIVDPGISSSGPAGSYRPYDEGLRRGVFITNETGQPLIGKVWPGSTAFPDFTNPEALAWWEDMVAEFHDQVPFDGMWIDMNEPSNFIRGSVDGCPNNELENPPYVPGVVGGTLQAATICASSHQFLSTHYNLHNLYGTTEAIASHRALVKARGTRPFVISRSTFAGHGRYAGHWTGDVWSSWEQLASSVPEILQFNLLGVPLVGADVCGFLGNTSEELCVRWTQLGAFYPFMRNHNSLTSLPQEPYSFSEPAQQAMRKALGLRYALLPHLYTLFHQAHVHGETVARPLFLEFPKDSSTWTVDHQMLWGEALLITPVLQPGKAEVTGYFPLGTWYDLQTVPVEALGSLPPPPAAPREPAIHSEGQWVTLPAPLDTINVHLREGYIIPLQGPGLTTTESRKQPMALAVALTKSGEARGELFWDDGESLEVLERGAYTQVIFMARNNTIVNELVHVTSEGAGLQLGKVTVLGVATAPQQVLSNGRPVSNFTYSPDTKVLDICVALLMGEQFLVSWC

SEQ ID NO: 665 - DNA, 2832 bp, synthetic construct
  misc_feature 1..2832: note = Variant of the Homo Sapiens Lysosomal alpha-glucosidase
  source 1..2832: mol_type = other DNA
atggaatggagctgggtctttctcttcttcctgtcagtaacgactggtgtccactccggacacattctgtggcatgatttttctaccgtgcctagagagctttccggttcaagtgaggtcctcgaagaaacacatccagcccatcaggttggcgcatctaggccgggccctcgggacgctcaactccacccagggagacctagggccgttcccactcagtgcgacgtgccagagaactcacgcttcgattgtgcacctgagaaggctatcacgcaagagcagtgcgaggcccgcggatgttgttacataccggctaaacaggggctgcagggtgcgcagatgggccaaccttggtgcttcttcccaccatcctatccgagttacaagctggagaatctctcccagtctgaaatgggatataccgcaacactgactcggaccaccccctccttctttcccaaagatatcttgactctgagacttgacgtaatgatggagacagaaaacaggctccactttaccattaaggaccctgccaatcgccgatacgaggtgcctctggaaacaccacacgtgcacagtagagctccatcacctctgtattctgtcgagttctccgaagagccgtttggcgttatcgtcaggaggcagctcgacgggcgagtgcttctgaacacgactgtggccccgttgttctttgcggatcagtttctgcaactgtcaacaagtctcccttctcagtacattaccgggcttgcagagcatctgtccccactcatgctgagtacttcatggaacaaaatcacactgtggaatagagaccttgctcctactccaggagccaacttgtatggttctcaccctttctacttggccctggaagatggcggatcagcgcatggcgtattcctcctgaattccaacgcaatggacgttgttcttcagccatctcctgctttgagttggagatctacaggcgggatactggacgtctacatctttctgggtccagagcctaaatccgtagtgcagcagtatcttgatgtcgtcggatacccgtttatgccaccatattggggcctggggttccacttgtgccgctggggatattcatccaccgccattacacgacaagttgttgagaatatgaccagggcacattttcctctggatgtacagtggaacgacctggactacatggatagtcgccgcgacttcaccttcaataaggatgggttcagagactttcctgctatggtccaagaacttcaccagggaggcaggaggtacatgatgatcgtagatccgggaatttcttcttctggcccagccggttcatacagaccgtatgacgaaggactgcgacgaggcgtctttatcacgaacgagactggtcagcctttgataggcaaggtttggccagggtccaccgctttcccggatttcacaaatcctgaggcactggcctggtgggaagatatggtcgccgagtttcacgaccaggtcccatttgacgggatgtggatcgacatgaacgagccatccaacttcattagaggaagtgtggatggctgtccgaataatgagctggaaaaccctccttacgtaccaggcgttgttggtgggactcttcaagctgcgacgatttgcgcatcctcccatcagttcctgtcaacccactataacttgcacaatctgtacgggacaacagaggctatcgccagtcatagggccctggtaaaagctagaggaacacgccctttcgttatctctcgctcaacttttgcaggccacggtaggtatgccggacattggaccggcgacgtctggagttcttgggaacagctggcttcctccgttccagagatattgcagtttaacctgttgggagtcccacttgtaggtgcagatgtttgtggcttcctggggaacacctcagaagaattgtgcgtaagatggactcaactgggcgccttctacccttttatgcgcaatcacaactcactgacatctttgcctcaagaaccgtactcatttagtgagccagcacagcaggccatgaggaaggctcttggcctgagatatgcacttctgccgcatctgtacacccttttccaccaggctcatgtccatggagagactgttgcacgacctctgttcttggagttcccaaaagactcttccacgtggacagtcgatcaccagatgctgtggggcgaggctctgctgattacacctgtattgcaacctggtaaggccgaagttaccgggtactttccattggggacctggtatgatctgcaaacagtcccggttgaagctcttggaagtcttccacctccacctgctgcaccaagggagcctgcgatccactctgaaggacagtgggtaactttgcctgcaccgctggacaccatcaatgtccatctgcgcgaaggctacatcataccacttcaaggtcctggactgaccactacagagtctagaaaacaaccaatggctcttgctgttgcactgactaaaagcggcgaagcaaggggtgagctgttctgggacgacggagagtcactggaggtactcgaacgaggcgcgtatacgcaggtcatttttgaggctcgcaataatacgatcgttaacgagctggtccacgtcacttcagaaggtgcaggccttcagttgggcaaggtaactgtcctgggagttgctacagcaccgcagcaggtcttgtccaacggacggcccgtaagcaactttacctatagtcctgataccaaagttctggacatctgcgttgctctgctgatgggtgagcagttcctggtatcatggtgc

SEQ ID NO: 666 - protein, 944 aa, synthetic construct
  REGION 1..944: note = Variant of the Homo Sapiens Lysosomal alpha-glucosidase
MEWSWVFLFFLSVTTGVHSGHILWHDFSTVPRELSGSSEVLEETHPAHQVGASRPGPRDAQLHPGRPRAVPTQCDVPENSRFDCAPEKAITQEQCEARGCCYIPAKQGLQGAQMGQPWCFFPPSYPSYKLENLSQSEMGYTATLTRTTPSFFPKDILTLRLDVMMETENRLHFTIKDPANRRYEVPLETPHVHSRAPSPLYSVEFSEEPFGVIVRRQLDGRVLLNTTVAPLFFADQFLQLSTSLPSQYITGLAEHLSPLMLSTSWNKITLWNRDLAPTPGANLYGSHPFYLALEDGGSAHGVFLLNSNAMDVVLQPSPALSWRSTGGILDVYIFLGPEPKSVVQQYLDVVGYPFMPPYWGLGFHLCRWGYSSTAITRQVVENMTRAHFPLDVQWNDLDYMDSRRDFTFNKDGFRDFPAMVQELHQGGRRYMMIVDPGISSSGPAGSYRPYDEGLRRGVFITNETGQPLIGKVWPGSTAFPDFTNPEALAWWEDMVAEFHDQVPFDGMWIDMNEPSNFIRGSVDGCPNNELENPPYVPGVVGGTLQAATICASSHQFLSTHYNLHNLYGTTEAIASHRALVKARGTRPFVISRSTFAGHGRYAGHWTGDVWSSWEQLASSVPEILQFNLLGVPLVGADVCGFLGNTSEELCVRWTQLGAFYPFMRNHNSLTSLPQEPYSFSEPAQQAMRKALGLRYALLPHLYTLFHQAHVHGETVARPLFLEFPKDSSTWTVDHQMLWGEALLITPVLQPGKAEVTGYFPLGTWYDLQTVPVEALGSLPPPPAAPREPAIHSEGQWVTLPAPLDTINVHLREGYIIPLQGPGLTTTESRKQPMALAVALTKSGEARGELFWDDGESLEVLERGAYTQVIFEARNNTIVNELVHVTSEGAGLQLGKVTVLGVATAPQQVLSNGRPVSNFTYSPDTKVLDICVALLMGEQFLVSWC

SEQ ID NO: 667 - DNA, 2832 bp, synthetic construct
  misc_feature 1..2832: note = Variant of the Homo Sapiens Lysosomal alpha-glucosidase
  source 1..2832: mol_type = other DNA
atggaatggagctgggtctttctcttcttcctgtcagtaacgactggtgtccactccggacacattctgtggcatgatttttctaccgtgcctagagagctttccggttcaagtcaagtcctcgaagaaacacatccagcccatcaggttggcgcatctaggccgggccctcgggacgctcaactccacccagggagacctagggccgttcccactcagtgcgacgtgccagagaactcacgcttcgattgtgcacctgagaaggctatcacgcaagagcagtgcgaggcccgcggatgttgttacataccggctaaacaggggctgcagggtgcgcagatgggccaaccttggtgcttcttcccaccatcctatccgagttacaagctggagaatctctcccagtctgaaatgggatataccgcaacactgactcggaccaccccctccttctttcccaaagatatcttgactctgagacttgacgtaatgatggagacagaaaacaggctccactttaccattaaggaccctgccaatcgccgatacgaggtgcctctggaaacaccacacgtgcacagtagagctccatcacctctgtattctgtcgagttctccgaagagccgtttggcgttatcgtcaggaggcagctcgacgggcgagtgcttctgaacacgactgtggccccgttgttctttgcggatcagtttctgcaactgtcaacaagtctcccttctcagtacattaccgggcttgcagagcatctgtccccactcatgctgagtacttcatggaacaaaatcacactgtggaatagagaccttgctcctactccaggagccaacttgtatggttctcaccctttctacttggccctggaagatggcggatcagcgcatggcgtattcctcctgaattccaacgcaatggacgttgttcttcagccatctcctgctttgagttggagatctacaggcgggatactggacgtctacatctttctgggtccagagcctaaatccgtagtgcagcagtatcttgatgtcgtcggatacccgtttatgccaccatattggggcctggggttccacttgtgccgctggggatattcatccaccgccattacacgacaagttgttgagaatatgaccagggcacattttcctctggatgtacagtggaacgacctggactacatggatagtcgccgcgacttcaccttcaataaggatgggttcagagactttcctgctatggtccaagaacttcaccagggaggcaggaggtacatgatgatcgtagatccgggaatttcttcttctggcccagccggttcatacagaccgtatgacgaaggactgcgacgaggcgtctttatcacgaacgagactggtcagcctttgataggcaaggtttggccagggtccaccgctttcccggatttcacaaatcctgaggcactggcctggtgggaagatatggtcgccgagtttcacgaccaggtcccatttgacgggatgtggatcgacatgaacgagccatccaacttcattagaggaagtgtggatggctgtccgaataatgagctggaaaaccctccttacgtaccaggcgttgttggtgggactcttcaagctgcgacgatttgcgcatcctcccatcagttcctgtcaacccactataacttgcacaatctgtacgggacaacagaggctatcgccagtcatagggccctggtaaaagctagaggaacacgccctttcgttatctctcgctcaacttttgcaggccacggtaggtatgccggacattggaccggcgacgtctggagttcttgggaacagctggcttcctccgttccagagatattgcagtttaacctgttgggagtcccacttgtaggtgcagatgtttgtggcttcctggggaacacctcagaagaattgtgcgtaagatggactcaactgggcgccttctacccttttatgcgcaatcacaactcactgacatctttgcctcaagaaccgtactcatttagtgagccagcacagcaggccatgaggaaggctcttggcctgagatatgcacttctgccgcatctgtacacccttttccaccaggctcatgtccatggagagactgttgcacgacctctgttcttggagttcccaaaagactcttccacgtggacagtcgatcaccagatgctgtggggcgaggctctgctgattacacctgtattgcaacctggtaaggccgaagttaccgggtactttccattggggacctggtatgatctgcaaacagtcccggttgaagctcttggaagtcttccacctccacctgctgcaccaagggagcctgcgatccactctgaaggacagtgggtaactttgcctgcaccgctggacaccatcaatgtccatctgcgcgaaggctacatcataccacttcaaggtcctggactgaccactacagagtctagaaaacaaccaatggctcttgctgttgcactgactaaaagcggcgaagcaaggggtgagctgttctgggacgacggagagtcactggaggtactcgaacgaggcgcgtatacgcaggtcatttttgaggctcgcaataatacgatcgttaacgagctggtccacgtcacttcagaaggtgcaggccttcagttgggcaaggtaactgtcctgggagttgctacagcaccgcagcaggtcttgtccaacggacggcccgtaagcaactttacctatagtcctgataccaaagttctggacatctgcgttaacctgctgatgggtgagcagttcctggtatcatggtgc

SEQ ID NO: 668 - protein, 944 aa, synthetic construct
  REGION 1..944: note = Variant of the Homo Sapiens Lysosomal alpha-glucosidase
MEWSWVFLFFLSVTTGVHSGHILWHDFSTVPRELSGSSQVLEETHPAHQVGASRPGPRDAQLHPGRPRAVPTQCDVPENSRFDCAPEKAITQEQCEARGCCYIPAKQGLQGAQMGQPWCFFPPSYPSYKLENLSQSEMGYTATLTRTTPSFFPKDILTLRLDVMMETENRLHFTIKDPANRRYEVPLETPHVHSRAPSPLYSVEFSEEPFGVIVRRQLDGRVLLNTTVAPLFFADQFLQLSTSLPSQYITGLAEHLSPLMLSTSWNKITLWNRDLAPTPGANLYGSHPFYLALEDGGSAHGVFLLNSNAMDVVLQPSPALSWRSTGGILDVYIFLGPEPKSVVQQYLDVVGYPFMPPYWGLGFHLCRWGYSSTAITRQVVENMTRAHFPLDVQWNDLDYMDSRRDFTFNKDGFRDFPAMVQELHQGGRRYMMIVDPGISSSGPAGSYRPYDEGLRRGVFITNETGQPLIGKVWPGSTAFPDFTNPEALAWWEDMVAEFHDQVPFDGMWIDMNEPSNFIRGSVDGCPNNELENPPYVPGVVGGTLQAATICASSHQFLSTHYNLHNLYGTTEAIASHRALVKARGTRPFVISRSTFAGHGRYAGHWTGDVWSSWEQLASSVPEILQFNLLGVPLVGADVCGFLGNTSEELCVRWTQLGAFYPFMRNHNSLTSLPQEPYSFSEPAQQAMRKALGLRYALLPHLYTLFHQAHVHGETVARPLFLEFPKDSSTWTVDHQMLWGEALLITPVLQPGKAEVTGYFPLGTWYDLQTVPVEALGSLPPPPAAPREPAIHSEGQWVTLPAPLDTINVHLREGYIIPLQGPGLTTTESRKQPMALAVALTKSGEARGELFWDDGESLEVLERGAYTQVIFEARNNTIVNELVHVTSEGAGLQLGKVTVLGVATAPQQVLSNGRPVSNFTYSPDTKVLDICVNLLMGEQFLVSWC

SEQ ID NO: 669 - DNA, 2832 bp, synthetic construct
  misc_feature 1..2832: note = Variant of the Homo Sapiens Lysosomal alpha-glucosidase
  source 1..2832: mol_type = other DNA
atggaatggagctgggtctttctcttcttcctgtcagtaacgactggtgtccactccggacacattctgtggcatgatttttctaccgtgcctagagagctttccggttcaagtcaagtcctcgaagaaacacatccagcccatcaggttggcgcatctaggccgggccctcgggacgctcaactccacccagggagacctagggccgttcccactcagtgcgacgtgccagagaactcacgcttcgattgtgcacctgagaaggctatcacgcaagagcagtgcgaggcccgcggatgttgttacataccggctaaacaggggctgcagggtgcgcagatgggccaaccttggtgcttcttcccaccatcctatccgagttacaagctggagaatctctcccagtctgaaatgggatataccgcaacactgactcggaccaccccctccttctttcccaaagatatcttgactctgagacttgacgtaatgatggagacagaaaacaggctccactttaccattaaggaccctgccaatcgccgatacgaggtgcctctggaaacaccacacgtgcacagtagagctccatcacctctgtattctgtcgagttctccgaagagccgtttggcgttatcgtcaggaggcagctcgacgggcgagtgcttctgaacacgactgtggccccgttgttctttgcggatcagtttctgcaactgtcaacaagtctcccttctcagtacattaccgggcttgcagagcatctgtccccactcatgctgagtacttcatggaacaaaatcacactgtggaatagagaccttgctcctactccaggagccaacttgtatggttctcaccctttctacttggccctggaagatggcggatcagcgcatggcgtattcctcctgaattccaacgcaatggacgttgttcttcagccatctcctgctttgagttggagatctacaggcgggatactggacgtctacatctttctgggtccagagcctaaatccgtagtgcagcagtatcttgatgtcgtcggatacccgtttatgccaccatattggggcctggggttccacttgtgccgctggggatattcatccaccgccattacacgacaagttgttgagaatatgaccagggcacattttcctctggatgtacagtggaacgacctggactacatggatagtcgccgcgacttcaccttcaataaggatgggttcagagactttcctgctatggtccaagaacttcaccagggaggcaggaggtacatgatgatcgtagatccgggaatttcttcttctggcccagccggttcatacagaccgtatgacgaaggactgcgacgaggcgtctttatcacgaacgagactggtcagcctttgataggcaaggtttggccagggtccaccgctttcccggatttcacaaatcctgaggcactggcctggtgggaagatatggtcgccgagtttcacgaccaggtcccatttgacgggatgtggatcgacatgaacgagccatccaacttcattagaggaagtgtggatggctgtccgaataatgagctggaaaaccctccttacgtaccaggcgttgttggtgggactcttcaagctgcgacgatttgcgcatcctcccatcagttcctgtcaacccactataacttgcacaatctgtacgggacaacagaggctatcgccagtcatagggccctggtaaaagctagaggaacacgccctttcgttatctctcgctcaacttttgcaggccacggtaggtatgccggacattggaccggcgacgtctggagttcttgggaacagctggcttcctccgttccagagatattgcagtttaacctgttgggagtcccacttgtaggtgcagatgtttgtggcttcctggggaacacctcagaagaattgtgcgtaagatggactcaactgggcgccttctacccttttatgcgcaatcacaactcactgacatctttgcctcaagaaccgtactcatttagtgagccagcacagcaggccatgaggaaggctcttggcctgagatatgcacttctgccgcatctgtacacccttttccaccaggctcatgtccatggagagactgttgcacgacctctgttcttggagttcccaaaagactcttccacgtggacagtcgatcaccagatgctgtggggcgaggctctgctgattacacctgtattgcaacctggtaaggccgaagttaccgggtactttccattggggacctggtatgatctgcaaacagtcccggttgaagctcttggaagtcttccacctccacctgctgcaccaagggagcctgcgatccactctgaaggacagtgggtaactttgcctgcaccgctggacaccatcaatgtccatctgcgcgaaggctacatcataccacttcaaggtcctggactgaccactacagagtctagaaaacaaccaatggctcttgctgttgcactgactaaaagcggcgaagcaaggggtgagctgttctgggacgacggagagtcactggaggtactcgaacgaggcgcgtatacgcaggtcatttttgaggctcgcaataatacgatcgttaacgagctggtccacgtcacttcagaaggtgcaggccttcagttgggcaaggtaactgtcctgggagttgctacagcaccgcagcaggtcttgtccaacggacggcccgtaagcaactttacctatagtcctgataccaaagttctggacatctgcgttatgctgctgatgggtgagcagttcctggtatcatggtgc

SEQ ID NO: 670 - protein, 944 aa, synthetic construct
  REGION 1..944: note = Variant of the Homo Sapiens Lysosomal alpha-glucosidase
MEWSWVFLFFLSVTTGVHSGHILWHDFSTVPRELSGSSQVLEETHPAHQVGASRPGPRDAQLHPGRPRAVPTQCDVPENSRFDCAPEKAITQEQCEARGCCYIPAKQGLQGAQMGQPWCFFPPSYPSYKLENLSQSEMGYTATLTRTTPSFFPKDILTLRLDVMMETENRLHFTIKDPANRRYEVPLETPHVHSRAPSPLYSVEFSEEPFGVIVRRQLDGRVLLNTTVAPLFFADQFLQLSTSLPSQYITGLAEHLSPLMLSTSWNKITLWNRDLAPTPGANLYGSHPFYLALEDGGSAHGVFLLNSNAMDVVLQPSPALSWRSTGGILDVYIFLGPEPKSVVQQYLDVVGYPFMPPYWGLGFHLCRWGYSSTAITRQVVENMTRAHFPLDVQWNDLDYMDSRRDFTFNKDGFRDFPAMVQELHQGGRRYMMIVDPGISSSGPAGSYRPYDEGLRRGVFITNETGQPLIGKVWPGSTAFPDFTNPEALAWWEDMVAEFHDQVPFDGMWIDMNEPSNFIRGSVDGCPNNELENPPYVPGVVGGTLQAATICASSHQFLSTHYNLHNLYGTTEAIASHRALVKARGTRPFVISRSTFAGHGRYAGHWTGDVWSSWEQLASSVPEILQFNLLGVPLVGADVCGFLGNTSEELCVRWTQLGAFYPFMRNHNSLTSLPQEPYSFSEPAQQAMRKALGLRYALLPHLYTLFHQAHVHGETVARPLFLEFPKDSSTWTVDHQMLWGEALLITPVLQPGKAEVTGYFPLGTWYDLQTVPVEALGSLPPPPAAPREPAIHSEGQWVTLPAPLDTINVHLREGYIIPLQGPGLTTTESRKQPMALAVALTKSGEARGELFWDDGESLEVLERGAYTQVIFEARNNTIVNELVHVTSEGAGLQLGKVTVLGVATAPQQVLSNGRPVSNFTYSPDTKVLDICVMLLMGEQFLVSWC

SEQ ID NO: 671 - DNA, 2832 bp, synthetic construct
  misc_feature 1..2832: note = Variant of the Homo Sapiens Lysosomal alpha-glucosidase
  source 1..2832: mol_type = other DNA
atggaatggagctgggtctttctcttcttcctgtcagtaacgactggtgtccactccggacacattctgtggcatgatttttctaccgtgcctagagagctttccggttcaagtcaagtcctcgaagaaacacatccagcccatcaggttggcgcatctaggccgggccctcgggacgctcaactccacccagggagacctagggccgttcccactcagtgcgacgtgccagagaactcacgcttcgattgtgcacctgagaaggctatcacgcaagagcagtgcgaggcccgcggatgttgttacataccggctaaacaggggctgcagggtgcgcagatgggccaaccttggtgcttcttcccaccatcctatccgagttacaagctggagaatctctcccagtctgaaatgggatataccgcaacactgactcggaccaccccctccttctttcccaaagatatcttgactctgagacttgacgtaatgatggagacagaaaacaggctccactttaccattaaggaccctgccaatcgccgatacgaggtgcctctggaaacaccacacgtgcacagtagagctccatcacctctgtattctgtcgagttctccgaagagccgtttggcgttatcgtcaggaggcagctcgacgggcgagtgcttctgaacacgactgtggccccgttgttctttgcggatcagtttctgcaactgtcaacaagtctcccttctcagtacattaccgggcttgcagagcatctgtccccactcatgctgagtacttcatggaacaaaatcacactgtggaatagagaccttgctcctactccaggagccaacttgtatggttctcaccctttctacttggccctggaagatggcggatcagcgcatggcgtattcctcctgaattccaacgcaatggacgttgttcttcagccatctcctgctttgagttggagatctacaggcgggatactggacgtctacatctttctgggtccagagcctaaatccgtagtgcagcagtatcttgatgtcgtcggatacccgtttatgccaccatattggggcctggggttccacttgtgccgctggggatattcatccaccgccattacacgacaagttgttgagaatatgaccagggcacattttcctctggatgtacagtggaacgacctggactacatggatagtcgccgcgacttcaccttcaataaggatgggttcagagactttcctgctatggtccaagaacttcaccagggaggcaggaggtacatgatgatcgtagatccgggaatttcttcttctggcccagccggttcatacagaccgtatgacgaaggactgcgacgaggcgtctttatcacgaacgagactggtcagcctttgataggcaaggtttggccagggtccaccgctttcccggatttcacaaatcctgaggcactggcctggtgggaagatatggtcgccgagtttcacgaccaggtcccatttgacgggatgtggatcgacatgaacgagccatccaacttcattagaggaagtgtggatggctgtccgaataatgagctggaaaaccctccttacgtaccaggcgttgttggtgggactcttcaagctgcgacgatttgcgcatcctcccatcagttcctgtcaacccactataacttgcacaatctgtacgggacaacagaggctatcgccagtcatagggccctggtaaaagctagaggaacacgccctttcgttatctctcgctcaacttttgcaggccacggtaggtatgccggacattggaccggcgacgtctggagttcttgggaacagctggcttcctccgttccagagatattgcagtttaacctgttgggagtcccacttgtaggtgcagatgtttgtggcttcctggggaacacctcagaagaattgtgcgtaagatggactcaactgggcgccttctacccttttatgcgcaatcacaactcactgacatctttgcctcaagaaccgtactcatttagtgagccagcacagcaggccatgaggaaggctcttggcctgagatatgcacttctgccgcatctgtacacccttttccaccaggctcatgtccatggagagactgttgcacgacctctgttcttggagttcccaaaagactcttccacgtggacagtcgatcaccagatgctgtggggcgaggctctgctgattacacctgtattgcaacctggtaaggccgaagttaccgggtactttccattggggacctggtatgatctgcaaacagtcccggttgaagctcttggaagtcttccacctccacctgctgcaccaagggagcctgcgatccactctgaaggacagtgggtaactttgcctgcaccgctggacaccatcaatgtccatctgcgcgaaggctacatcataccacttcaaggtcctggactgaccactacagagtctagaaaacaaccaatggctcttgctgttgcactgactaaaagcggcgaagcaaggggtgagctgttctgggacgacggagagtcactggaggtactcgaacgaggcgcgtatacgcaggtcatttttgaggctcgcaataatacgatcgttaacgagctggtccacgtcacttcagaaggtgcaggccttcagttgggcaaggtaactgtcctgggagttgctacagcaccgcagcaggtcttgtccaacggaatgcccgtaagcaactttacctatagtcctgataccaaagttctggacatctgcgttgctctgctgatgggtgagcagttcctggtatcatggtgc

SEQ ID NO: 672 - protein, 944 aa, synthetic construct
  REGION 1..944: note = Variant of the Homo Sapiens Lysosomal alpha-glucosidase
MEWSWVFLFFLSVTTGVHSGHILWHDFSTVPRELSGSSQVLEETHPAHQVGASRPGPRDAQLHPGRPRAVPTQCDVPENSRFDCAPEKAITQEQCEARGCCYIPAKQGLQGAQMGQPWCFFPPSYPSYKLENLSQSEMGYTATLTRTTPSFFPKDILTLRLDVMMETENRLHFTIKDPANRRYEVPLETPHVHSRAPSPLYSVEFSEEPFGVIVRRQLDGRVLLNTTVAPLFFADQFLQLSTSLPSQYITGLAEHLSPLMLSTSWNKITLWNRDLAPTPGANLYGSHPFYLALEDGGSAHGVFLLNSNAMDVVLQPSPALSWRSTGGILDVYIFLGPEPKSVVQQYLDVVGYPFMPPYWGLGFHLCRWGYSSTAITRQVVENMTRAHFPLDVQWNDLDYMDSRRDFTFNKDGFRDFPAMVQELHQGGRRYMMIVDPGISSSGPAGSYRPYDEGLRRGVFITNETGQPLIGKVWPGSTAFPDFTNPEALAWWEDMVAEFHDQVPFDGMWIDMNEPSNFIRGSVDGCPNNELENPPYVPGVVGGTLQAATICASSHQFLSTHYNLHNLYGTTEAIASHRALVKARGTRPFVISRSTFAGHGRYAGHWTGDVWSSWEQLASSVPEILQFNLLGVPLVGADVCGFLGNTSEELCVRWTQLGAFYPFMRNHNSLTSLPQEPYSFSEPAQQAMRKALGLRYALLPHLYTLFHQAHVHGETVARPLFLEFPKDSSTWTVDHQMLWGEALLITPVLQPGKAEVTGYFPLGTWYDLQTVPVEALGSLPPPPAAPREPAIHSEGQWVTLPAPLDTINVHLREGYIIPLQGPGLTTTESRKQPMALAVALTKSGEARGELFWDDGESLEVLERGAYTQVIFEARNNTIVNELVHVTSEGAGLQLGKVTVLGVATAPQQVLSNGMPVSNFTYSPDTKVLDICVALLMGEQFLVSWC

SEQ ID NO: 673 - DNA, 2832 bp, synthetic construct
  misc_feature 1..2832: note = Variant of the Homo Sapiens Lysosomal alpha-glucosidase
  source 1..2832: mol_type = other DNA
atggaatggagctgggtctttctcttcttcctgtcagtaacgactggtgtccactccggacacattctgtggcatgatttttctaccgtgcctagagagctttccggttcaagtcaagtcctcgaagaaacacatccagcccatcaggttggcgcatctaggccgggccctcgggacgctcaactccacccagggagacctagggccgttcccactcagtgcgacgtgccagagaactcacgcttcgattgtgcacctgagaaggctatcacgcaagagcagtgcgaggcccgcggatgttgttacataccggctaaacaggggctgcagggtgcgcagatgggccaaccttggtgcttcttcccaccatcctatccgagttacaagctggagaatctctcccagtctgaaatgggatataccgcaacactgactcggaccaccccctccttctttcccaaagatatcttgactctgagacttgacgtaatgatggagacagaaaacaggctccactttaccattaaggaccctgccaatcgccgatacgaggtgcctctggaaacaccacacgtgcacagtagagctccatcacctctgtattctgtcgagttctccgaagagccgtttggcgttatcgtcaggaggcagctcgacgggcgagtgcttctgaacacgactgtggccccgttgttctttgcggatcagtttctgcaactgtcaacaagtctcccttctcagtacattaccgggcttgcagagcatctgtccccactcatgctgagtacttcatggaacaaaatcacactgtggaatagagaccttgctcctactccaggagccaacttgtatggttctcaccctttctacttggccctggaagatggcggatcagcgcatggcgtattcctcctgaattccaacgcaatggacgttgttcttcagccatctcctgctttgagttggagatctacaggcgggatactggacgtctacatctttctgggtccagagcctaaatccgtagtgcagcagtatcttgatgtcgtcggatacccgtttatgccaccatattggggcctggggttccacttgtgccgctggggatattcatccaccgccattacacgacaagttgttgagaatatgaccagggcacattttcctctggatgtacagtggaacgacctggactacatggatagtcgccgcgacttcaccttcaataaggatgggttcagagactttcctgctatggtccaagaacttcaccagggaggcaggaggtacatgatgatcgtagatccgggaatttcttcttctggcccagccggttcatacagaccgtatgacgaaggactgcgacgaggcgtctttatcacgaacgagactggtcagcctttgataggcaaggtttggccagggtccaccgctttcccggatttcacaaatcctgaggcactggcctggtgggaagatatggtcgccgagtttcacgaccaggtcccatttgacgggatgtggatcgacatgaacgagccatccaacttcattagaggaagtgtggatggctgtccgaataatgagctggaaaaccctccttacgtaccaggcgttgttggtgggactcttcaagctgcgacgatttgcgcatcctcccatcagttcctgtcaacccactataacttgcacaatctgtacgggtggacagaggctatcgccagtcatagggccctggtaaaagctagaggaacacgccctttcgttatctctcgctcaacttttgcaggccacggtaggtatgccggacattggaccggcgacgtctggagttcttgggaacagctggcttcctccgttccagagatattgcagtttaacctgttgggagtcccacttgtaggtgcagatgtttgtggcttcctggggaacacctcagaagaattgtgcgtaagatggactcaactgggcgccttctacccttttatgcgcaatcacaactcactgacatctttgcctcaagaaccgtactcatttagtgagccagcacagcaggccatgaggaaggctcttggcctgagatatgcacttctgccgcatctgtacacccttttccaccaggctcatgtccatggagagactgttgcacgacctctgttcttggagttcccaaaagactcttccacgtggacagtcgatcaccagatgctgtggggcgaggctctgctgattacacctgtattgcaacctggtaaggccgaagttaccgggtactttccattggggacctggtatgatctgcaaacagtcccggttgaagctcttggaagtcttccacctccacctgctgcaccaagggagcctgcgatccactctgaaggacagtgggtaactttgcctgcaccgctggacaccatcaatgtccatctgcgcgaaggctacatcataccacttcaaggtcctggactgaccactacagagtctagaaaacaaccaatggctcttgctgttgcactgactaaaagcggcgaagcaaggggtgagctgttctgggacgacggagagtcactggaggtactcgaacgaggcgcgtatacgcaggtcatttttgaggctcgcaataatacgatcgttaacgagctggtccacgtcacttcagaaggtgcaggccttcagttgggcaaggtaactgtcctgggagttgctacagcaccgcagcaggtcttgtccaacggacggcccgtaagcaactttacctatagtcctgataccaaagttctggacatctgcgttgctctgctgatgggtgagcagttcctggtatcatggtgc

SEQ ID NO: 674 - protein, 944 aa, synthetic construct
  REGION 1..944: note = Variant of the Homo Sapiens Lysosomal alpha-glucosidase
MEWSWVFLFFLSVTTGVHSGHILWHDFSTVPRELSGSSQVLEETHPAHQVGASRPGPRDAQLHPGRPRAVPTQCDVPENSRFDCAPEKAITQEQCEARGCCYIPAKQGLQGAQMGQPWCFFPPSYPSYKLENLSQSEMGYTATLTRTTPSFFPKDILTLRLDVMMETENRLHFTIKDPANRRYEVPLETPHVHSRAPSPLYSVEFSEEPFGVIVRRQLDGRVLLNTTVAPLFFADQFLQLSTSLPSQYITGLAEHLSPLMLSTSWNKITLWNRDLAPTPGANLYGSHPFYLALEDGGSAHGVFLLNSNAMDVVLQPSPALSWRSTGGILDVYIFLGPEPKSVVQQYLDVVGYPFMPPYWGLGFHLCRWGYSSTAITRQVVENMTRAHFPLDVQWNDLDYMDSRRDFTFNKDGFRDFPAMVQELHQGGRRYMMIVDPGISSSGPAGSYRPYDEGLRRGVFITNETGQPLIGKVWPGSTAFPDFTNPEALAWWEDMVAEFHDQVPFDGMWIDMNEPSNFIRGSVDGCPNNELENPPYVPGVVGGTLQAATICASSHQFLSTHYNLHNLYGWTEAIASHRALVKARGTRPFVISRSTFAGHGRYAGHWTGDVWSSWEQLASSVPEILQFNLLGVPLVGADVCGFLGNTSEELCVRWTQLGAFYPFMRNHNSLTSLPQEPYSFSEPAQQAMRKALGLRYALLPHLYTLFHQAHVHGETVARPLFLEFPKDSSTWTVDHQMLWGEALLITPVLQPGKAEVTGYFPLGTWYDLQTVPVEALGSLPPPPAAPREPAIHSEGQWVTLPAPLDTINVHLREGYIIPLQGPGLTTTESRKQPMALAVALTKSGEARGELFWDDGESLEVLERGAYTQVIFEARNNTIVNELVHVTSEGAGLQLGKVTVLGVATAPQQVLSNGRPVSNFTYSPDTKVLDICVALLMGEQFLVSWC

SEQ ID NO: 675 - DNA, 2832 bp, synthetic construct
  misc_feature 1..2832: note = Variant of the Homo Sapiens Lysosomal alpha-glucosidase
  source 1..2832: mol_type = other DNA
atggaatggagctgggtctttctcttcttcctgtcagtaacgactggtgtccactccggacacattctgtggcatgatttttctaccgtgcctagagagctttccggttcaagtcaagtcctcgaagaaacacatccagcccatcaggttggcgcatctaggccgggccctcgggacgctcaactccacccagggagacctagggccgttcccactcagtgcgacgtgccagagaactcacgcttcgattgtgcacctgagaaggctatcacgcaagagcagtgcgaggcccgcggatgttgttacataccggctaaacaggggctgcagggtgcgcagatgggccaaccttggtgcttcttcccaccatcctatccgagttacaagctggagaatctctcccagtctgaaatgggatataccgcaacactgactcggaccaccccctccttctttcccaaagatatcttgactctgagacttgacgtaatgatggagacagaaaacaggctccactttaccattaaggaccctgccaatcgccgatacgaggtgcctctggaaacaccacacgtgcacagtagagctccatcacctctgtattctgtcgagttctccgaagagccgtttggcgttatcgtcaggaggcagctcgacgggcgagtgcttctgaacacgactgtggccccgttgttctttgcggatcagtttctgcaactgtcaacaagtctcccttctcagtacattaccgggcttgcagagcatctgtccccactcatgctgagtacttcatggaacaaaatcacactgtggaatagagaccttgctcctactccaggagccaacttgtatggttctcaccctttctacttggccctggaagatggcggatcagcgcatggcgtattcctcctgaattccaacgcaatggacgttgttcttcagccatctcctgctttgagttggagatctacaggcgggatactggacgtctacatctttctgggtccagagcctaaatccgtagtgcagcagtatcttgatgtcgtcggatacccgtttatgccaccatattggggcctggggttccacttgtgccgctggggatattcatccaccgccattacacgacaagttgttgagaatatgaccagggcacattttcctctggatgtacagtggaacgacctggactacatggatagtcgccgcgacttcaccttcaataaggatgggttcagagactttcctgctatggtccaagaacttcaccagggaggcaggaggtacatgatgatcgtagatccgggaatttcttcttctggcccagccggttcatacagaccgtatgacgaaggactgcgacgaggcgtctttatcacgaacgagactggtcagcctttgataggcaaggtttggccagggtccaccgctttcccggatttcacaaatcctagcgcactggcctggtgggaagatatggtcgccgagtttcacgaccaggtcccatttgacgggatgtggatcgacatgaacgagccatccaacttcattagaggaagtgtggatggctgtccgaataatgagctggaaaaccctccttacgtaccaggcgttgttggtgggactcttcaagctgcgacgatttgcgcatcctcccatcagttcctgtcaacccactataacttgcacaatctgtacgggacaacagaggctatcgccagtcatagggccctggtaaaagctagaggaacacgccctttcgttatctctcgctcaacttttgcaggccacggtaggtatgccggacattggaccggcgacgtctggagttcttgggaacagctggcttcctccgttccagagatattgcagtttaacctgttgggagtcccacttgtaggtgcagatgtttgtggcttcctggggaacacctcagaagaattgtgcgtaagatggactcaactgggcgccttctacccttttatgcgcaatcacaactcactgacatctttgcctcaagaaccgtactcatttagtgagccagcacagcaggccatgaggaaggctcttggcctgagatatgcacttctgccgcatctgtacacccttttccaccaggctcatgtccatggagagactgttgcacgacctctgttcttggagttcccaaaagactcttccacgtggacagtcgatcaccagatgctgtggggcgaggctctgctgattacacctgtattgcaacctggtaaggccgaagttaccgggtactttccattggggacctggtatgatctgcaaacagtcccggttgaagctcttggaagtcttccacctccacctgctgcaccaagggagcctgcgatccactctgaaggacagtgggtaactttgcctgcaccgctggacaccatcaatgtccatctgcgcgaaggctacatcataccacttcaaggtcctggactgaccactacagagtctagaaaacaaccaatggctcttgctgttgcactgactaaaagcggcgaagcaaggggtgagctgttctgggacgacggagagtcactggaggtactcgaacgaggcgcgtatacgcaggtcatttttgaggctcgcaataatacgatcgttaacgagctggtccacgtcacttcagaaggtgcaggccttcagttgggcaaggtaactgtcctgggagttgctacagcaccgcagcaggtcttgtccaacggacggcccgtaagcaactttacctatagtcctgataccaaagttctggacatctgcgttgctctgctgatgggtgagcagttcctggtatcatggtgc

SEQ ID NO: 676 - protein, 944 aa, synthetic construct
  REGION 1..944: note = Variant of the Homo Sapiens Lysosomal alpha-glucosidase
MEWSWVFLFFLSVTTGVHSGHILWHDFSTVPRELSGSSQVLEETHPAHQVGASRPGPRDAQLHPGRPRAVPTQCDVPENSRFDCAPEKAITQEQCEARGCCYIPAKQGLQGAQMGQPWCFFPPSYPSYKLENLSQSEMGYTATLTRTTPSFFPKDILTLRLDVMMETENRLHFTIKDPANRRYEVPLETPHVHSRAPSPLYSVEFSEEPFGVIVRRQLDGRVLLNTTVAPLFFADQFLQLSTSLPSQYITGLAEHLSPLMLSTSWNKITLWNRDLAPTPGANLYGSHPFYLALEDGGSAHGVFLLNSNAMDVVLQPSPALSWRSTGGILDVYIFLGPEPKSVVQQYLDVVGYPFMPPYWGLGFHLCRWGYSSTAITRQVVENMTRAHFPLDVQWNDLDYMDSRRDFTFNKDGFRDFPAMVQELHQGGRRYMMIVDPGISSSGPAGSYRPYDEGLRRGVFITNETGQPLIGKVWPGSTAFPDFTNPSALAWWEDMVAEFHDQVPFDGMWIDMNEPSNFIRGSVDGCPNNELENPPYVPGVVGGTLQAATICASSHQFLSTHYNLHNLYGTTEAIASHRALVKARGTRPFVISRSTFAGHGRYAGHWTGDVWSSWEQLASSVPEILQFNLLGVPLVGADVCGFLGNTSEELCVRWTQLGAFYPFMRNHNSLTSLPQEPYSFSEPAQQAMRKALGLRYALLPHLYTLFHQAHVHGETVARPLFLEFPKDSSTWTVDHQMLWGEALLITPVLQPGKAEVTGYFPLGTWYDLQTVPVEALGSLPPPPAAPREPAIHSEGQWVTLPAPLDTINVHLREGYIIPLQGPGLTTTESRKQPMALAVALTKSGEARGELFWDDGESLEVLERGAYTQVIFEARNNTIVNELVHVTSEGAGLQLGKVTVLGVATAPQQVLSNGRPVSNFTYSPDTKVLDICVALLMGEQFLVSWC

SEQ ID NO: 677 - DNA, 2832 bp, synthetic construct
  misc_feature 1..2832: note = Variant of the Homo Sapiens Lysosomal alpha-glucosidase
  source 1..2832: mol_type = other DNA
atggaatggagctgggtctttctcttcttcctgtcagtaacgactggtgtccactccggacacattctgtggcatgatttttctaccgtgcctagagagctttccggttcaagtcaagtcctcgaagaaacacatccagcccatcaggttggcgcatctaggccgggccctcgggacgctcaactccacccagggagacctagggccgttcccactcagtgcgacgtgccagagaactcacgcttcgattgtgcacctgagaaggctatcacgcaagagcagtgcgaggcccgcggatgttgttacataccggctaaacaggggctgcagggtgcgcagatgggccaaccttggtgcttcttcccaccatcctatccgagttacaagctggagaatctctcccagtctgaaatgggatataccgcaacactgactcggaccaccccctccttctttcccaaagatatcttgactctgagacttgacgtaatgatggagacagaaaacaggctccactttaccattaaggaccctgccaatcgccgatacgaggtgcctctggaaacaccacacgtgcacagtagagctccatcacctctgtattctgtcgagttctccgaagagccgtttggcgttatcgtcaggaggcagctcgacgggcgagtgcttctgaacacgactgtggccccgttgttctttgcggatcagtttctgcaactgtcaacaagtctcccttctcagtacattaccgggcttgcagagcatctgtccccactcatgctgagtacttcatggaacaaaatcacactgtggaatagagaccttgctcctactccaggagccaacttgtatggttctcaccctttctacttggccctggaagatggcggatcagcgcatggcgtattcctcctgaattccaacgcaatggacgttgttcttcagccatctcctgctttgagttggagatctacaggcgggatactggacgtctacatctttctgggtccagagcctaaatccgtagtgcagcagtatcttgatgtcgtcggatacccgtttatgccaccatattggggcctggggttccacttgtgccgctggggatattcatccaccgccattacacgacaagttgttgagaatatgaccagggcacattttcctctggatgtacagtggaacgacctggactacatggatagtcgccgcgacttcaccttcaataaggatgggttcagagactttcctgctatggtccaagaacttcaccagggaggcaggaggtacatgatgatcgtagatccgggaatttcttcttctggcccagccggttcatacagaccgtatgacgaaggactgcgacgaggcgtctttatcacgaacgagactggtcagcctttgataggcaaggtttggccagggtccaccgctttcccggatttcacaaatcctgaggcactggcctggtgggaagatatggtcgccgagtttcacgaccaggtcccatttgacgggatgtggatcgacatgaacgagccatccaacttcattagaggaagtgtggatggctgtccgaataatgagctggaaaaccctccttacgtaccaggcgttgttggtgggactcttcaagctgcgacgatttgcgcatcctcccatcagttcctgtcaacccactataacttgcacaatctgtacgggacaacagaggctatcgccagtcatagggccctggtaaaagctagaggaacacgccctttcgttatctctcgctcaacttttgcaggccacggtaggtatgccggacattggaccggcgacgtctggagttcttgggaacagctggcttcctccgttccagagatattgcagtttaacctgttgggagtcccacttgtaggtgcagatgtttgtggcttcctggggaacacctcagaagaattgtgcgtaagatggactcaactgggcgccttctacccttttatgcgcaatcacaactcactgacatctttgcctcaagaaccgtactcatttagtgagccagcacagcaggccatgaggaaggctcttggcctgagatatgcacttctgccgcatctgtacacccttttccaccaggctcatgtcatcggagagactgttgcacgacctctgttcttggagttcccaaaagactcttccacgtggacagtcgatcaccagatgctgtggggcgaggctctgctgattacacctgtattgcaacctggtaaggccgaagttaccgggtactttccattggggacctggtatgatctgcaaacagtcccggttgaagctcttggaagtcttccacctccacctgctgcaccaagggagcctgcgatccactctgaaggacagtgggtaactttgcctgcaccgctggacaccatcaatgtccatctgcgcgaaggctacatcataccacttcaaggtcctggactgaccactacagagtctagaaaacaaccaatggctcttgctgttgcactgactaaaagcggcgaagcaaggggtgagctgttctgggacgacggagagtcactggaggtactcgaacgaggcgcgtatacgcaggtcatttttgaggctcgcaataatacgatcgttaacgagctggtccacgtcacttcagaaggtgcaggccttcagttgggcaaggtaactgtcctgggagttgctacagcaccgcagcaggtcttgtccaacggacggcccgtaagcaactttacctatagtcctgataccaaagttctggacatctgcgttgctctgctgatgggtgagcagttcctggtatcatggtgc

SEQ ID NO: 678 - protein, 944 aa, synthetic construct
  REGION 1..944: note = Variant of the Homo Sapiens Lysosomal alpha-glucosidase
MEWSWVFLFFLSVTTGVHSGHILWHDFSTVPRELSGSSQVLEETHPAHQVGASRPGPRDAQLHPGRPRAVPTQCDVPENSRFDCAPEKAITQEQCEARGCCYIPAKQGLQGAQMGQPWCFFPPSYPSYKLENLSQSEMGYTATLTRTTPSFFPKDILTLRLDVMMETENRLHFTIKDPANRRYEVPLETPHVHSRAPSPLYSVEFSEEPFGVIVRRQLDGRVLLNTTVAPLFFADQFLQLSTSLPSQYITGLAEHLSPLMLSTSWNKITLWNRDLAPTPGANLYGSHPFYLALEDGGSAHGVFLLNSNAMDVVLQPSPALSWRSTGGILDVYIFLGPEPKSVVQQYLDVVGYPFMPPYWGLGFHLCRWGYSSTAITRQVVENMTRAHFPLDVQWNDLDYMDSRRDFTFNKDGFRDFPAMVQELHQGGRRYMMIVDPGISSSGPAGSYRPYDEGLRRGVFITNETGQPLIGKVWPGSTAFPDFTNPEALAWWEDMVAEFHDQVPFDGMWIDMNEPSNFIRGSVDGCPNNELENPPYVPGVVGGTLQAATICASSHQFLSTHYNLHNLYGTTEAIASHRALVKARGTRPFVISRSTFAGHGRYAGHWTGDVWSSWEQLASSVPEILQFNLLGVPLVGADVCGFLGNTSEELCVRWTQLGAFYPFMRNHNSLTSLPQEPYSFSEPAQQAMRKALGLRYALLPHLYTLFHQAHVIGETVARPLFLEFPKDSSTWTVDHQMLWGEALLITPVLQPGKAEVTGYFPLGTWYDLQTVPVEALGSLPPPPAAPREPAIHSEGQWVTLPAPLDTINVHLREGYIIPLQGPGLTTTESRKQPMALAVALTKSGEARGELFWDDGESLEVLERGAYTQVIFEARNNTIVNELVHVTSEGAGLQLGKVTVLGVATAPQQVLSNGRPVSNFTYSPDTKVLDICVALLMGEQFLVSWC

SEQ ID NO: 679 - DNA, 2832 bp, synthetic construct
  misc_feature 1..2832: note = Variant of the Homo Sapiens Lysosomal alpha-glucosidase
  source 1..2832: mol_type = other DNA
atggaatggagctgggtctttctcttcttcctgtcagtaacgactggtgtccactccggacacattctgtggcatgatttttctaccgtgcctagagagctttccggttcaagtcaagtcctcgaagaaacacatccagcccatcaggttggcgcatctaggccgggccctcgggacgctcaactccacccagggagacctagggccgttcccactcagtgcgacgtgccagagaactcacgcttcgattgtgcacctgagaaggctatcacgcaagagcagtgcgaggcccgcggatgttgttacataccggctaaacaggggctgcagggtgcgcagatgggccaaccttggtgcttcttcccaccatcctatccgagttacaagctggagaatctctcccagtctgaaatgggatataccgcaacactgactcggaccaccccctccttctttcccaaagatatcttgactctgagacttgacgtaatgatggagacagaaaacaggctccactttaccattaaggaccctgccaatcgccgatacgaggtgcctctggaaacaccacacgtgcacagtagagctccatcacctctgtattctgtcgagttctccgaagagccgtttggcgttatcgtcaggaggcagctcgacgggcgagtgcttctgaacacgactgtggccccgttgttctttgcggatcagtttctgcaactgtcaacaagtctcccttctcagtacattaccgggcttgcagagcatctgtccccactcatgctgagtacttcatggaacaaaatcacactgtggaatagagaccttgctcctactccaggagccaacttgtatggttctcaccctttctacttggccctggaagatggcggatcagcgcatggcgtattcctcctgaattccaacgcaatggacgttgttcttcagccatctcctgctttgagttggagatctacaggcgggatactggacgtctacatctttctgggtccagagcctaaatccgtagtgcagcagtatcttgatgtcgtcggatacccgtttatgccaccatattggggcctggggttccacttgtgccgctggggatattcatccaccgccattacacgacaagttgttgagaatatgaccagggcacattttcctctggatgtacagtggaacgacctggactacatggatagtcgccgcgacttcaccttcaataaggatgggttcagagactttcctgctatggtccaagaacttcaccagggaggcaggaggtacatgatgatcgtagatccgggaatttcttcttctggcccagccggttcatacagaccgtatgacgaaggactgcgacgaggcgtctttatcacgaacgagactggtcagcctttgataggcaaggtttggccagggtccaccgctttcccggatttcacaaatcctgaggcactggcctggtgggaagatatggtcgccgagtttcacgaccaggtcccatttgacgggatgtggatcgacatgaacgagccatccaacttcattagaggaagtgtggatggctgtccgaataatgagctggaaaaccctccttacgtaccaggcgttgttggtgggactcttcaagctgcgacgatttgcgcatcctcccatcagttcctgtcaacccactataacttgcacaatctgtacgggacaacagaggctatcgccagtcatagggccctggtaaaagctagaggaacacgccctttcgttatctctcgctcaacttttgcaggccacggtaggtatgccggacattggaccggcgacgtctggagttcttgggaacagctggcttcctccgttccagagatattgcagtttaacctgttgggagtcccacttgtaggtgcagatgtttgtggcttcctggggaacacctcagaagaattgtgcgtaagatggactcaactgggcgccttctacccttttatgcgcaatcacaactcactgacatctttgcctcaagaaccgtactcatttagtgagccagcacagcaggccatgaggaaggctcttggcctgagatatgcacttctgccgcatctgtacacccttttccaccaggctcatgtctgcggagagactgttgcacgacctctgttcttggagttcccaaaagactcttccacgtggacagtcgatcaccagatgctgtggggcgaggctctgctgattacacctgtattgcaacctggtaaggccgaagttaccgggtactttccattggggacctggtatgatctgcaaacagtcccggttgaagctcttggaagtcttccacctccacctgctgcaccaagggagcctgcgatccactctgaaggacagtgggtaactttgcctgcaccgctggacaccatcaatgtccatctgcgcgaaggctacatcataccacttcaaggtcctggactgaccactacagagtctagaaaacaaccaatggctcttgctgttgcactgactaaaagcggcgaagcaaggggtgagctgttctgggacgacggagagtcactggaggtactcgaacgaggcgcgtatacgcaggtcatttttgaggctcgcaataatacgatcgttaacgagctggtccacgtcacttcagaaggtgcaggccttcagttgggcaaggtaactgtcctgggagttgctacagcaccgcagcaggtcttgtccaacggacggcccgtaagcaactttacctatagtcctgataccaaagttctggacatctgcgttgctctgctgatgggtgagcagttcctggtatcatggtgc

SEQ ID NO: 680 - protein, 944 aa, synthetic construct
  REGION 1..944: note = Variant of the Homo Sapiens Lysosomal alpha-glucosidase
MEWSWVFLFFLSVTTGVHSGHILWHDFSTVPRELSGSSQVLEETHPAHQVGASRPGPRDAQLHPGRPRAVPTQCDVPENSRFDCAPEKAITQEQCEARGCCYIPAKQGLQGAQMGQPWCFFPPSYPSYKLENLSQSEMGYTATLTRTTPSFFPKDILTLRLDVMMETENRLHFTIKDPANRRYEVPLETPHVHSRAPSPLYSVEFSEEPFGVIVRRQLDGRVLLNTTVAPLFFADQFLQLSTSLPSQYITGLAEHLSPLMLSTSWNKITLWNRDLAPTPGANLYGSHPFYLALEDGGSAHGVFLLNSNAMDVVLQPSPALSWRSTGGILDVYIFLGPEPKSVVQQYLDVVGYPFMPPYWGLGFHLCRWGYSSTAITRQVVENMTRAHFPLDVQWNDLDYMDSRRDFTFNKDGFRDFPAMVQELHQGGRRYMMIVDPGISSSGPAGSYRPYDEGLRRGVFITNETGQPLIGKVWPGSTAFPDFTNPEALAWWEDMVAEFHDQVPFDGMWIDMNEPSNFIRGSVDGCPNNELENPPYVPGVVGGTLQAATICASSHQFLSTHYNLHNLYGTTEAIASHRALVKARGTRPFVISRSTFAGHGRYAGHWTGDVWSSWEQLASSVPEILQFNLLGVPLVGADVCGFLGNTSEELCVRWTQLGAFYPFMRNHNSLTSLPQEPYSFSEPAQQAMRKALGLRYALLPHLYTLFHQAHVCGETVARPLFLEFPKDSSTWTVDHQMLWGEALLITPVLQPGKAEVTGYFPLGTWYDLQTVPVEALGSLPPPPAAPREPAIHSEGQWVTLPAPLDTINVHLREGYIIPLQGPGLTTTESRKQPMALAVALTKSGEARGELFWDDGESLEVLERGAYTQVIFEARNNTIVNELVHVTSEGAGLQLGKVTVLGVATAPQQVLSNGRPVSNFTYSPDTKVLDICVALLMGEQFLVSWC

SEQ ID NO: 681 - DNA, 2832 bp, synthetic construct
  misc_feature 1..2832: note = Variant of the Homo Sapiens Lysosomal alpha-glucosidase
  source 1..2832: mol_type = other DNA
atggaatggagctgggtctttctcttcttcctgtcagtaacgactggtgtccactccggacacattctgtggcatgatttttctaccgtgcctagagagctttccggttcaagtcaagtcctcgaagaaacacatccagcccatcagtggggcgcatctaggccgggccctcgggacgctcaactccacccagggagacctagggccgttcccactcagtgcgacgtgccagagaactcacgcttcgattgtgcacctgagaaggctatcacgcaagagcagtgcgaggcccgcggatgttgttacataccggctaaacaggggctgcagggtgcgcagatgggccaaccttggtgcttcttcccaccatcctatccgagttacaagctggagaatctctcccagtctgaaatgggatataccgcaacactgactcggaccaccccctccttctttcccaaagatatcttgactctgagacttgacgtaatgatggagacagaaaacaggctccactttaccattaaggaccctgccaatcgccgatacgaggtgcctctggaaacaccacacgtgcacagtagagctccatcacctctgtattctgtcgagttctccgaagagccgtttggcgttatcgtcaggaggcagctcgacgggcgagtgcttctgaacacgactgtggccccgttgttctttgcggatcagtttctgcaactgtcaacaagtctcccttctcagtacattaccgggcttgcagagcatctgtccccactcatgctgagtacttcatggaacaaaatcacactgtggaatagagaccttgctcctactccaggagccaacttgtatggttctcaccctttctacttggccctggaagatggcggatcagcgcatggcgtattcctcctgaattccaacgcaatggacgttgttcttcagccatctcctgctttgagttggagatctacaggcgggatactggacgtctacatctttctgggtccagagcctaaatccgtagtgcagcagtatcttgatgtcgtcggatacccgtttatgccaccatattggggcctggggttccacttgtgccgctggggatattcatccaccgccattacacgacaagttgttgagaatatgaccagggcacattttcctctggatgtacagtggaacgacctggactacatggatagtcgccgcgacttcaccttcaataaggatgggttcagagactttcctgctatggtccaagaacttcaccagggaggcaggaggtacatgatgatcgtagatccgggaatttcttcttctggcccagccggttcatacagaccgtatgacgaaggactgcgacgaggcgtctttatcacgaacgagactggtcagcctttgataggcaaggtttggccagggtccaccgctttcccggatttcacaaatcctgaggcactggcctggtgggaagatatggtcgccgagtttcacgaccaggtcccatttgacgggatgtggatcgacatgaacgagccatccaacttcattagaggaagtgtggatggctgtccgaataatgagctggaaaaccctccttacgtaccaggcgttgttggtgggactcttcaagctgcgacgatttgcgcatcctcccatcagttcctgtcaacccactataacttgcacaatctgtacgggacaacagaggctatcgccagtcatagggccctggtaaaagctagaggaacacgccctttcgttatctctcgctcaacttttgcaggccacggtaggtatgccggacattggaccggcgacgtctggagttcttgggaacagctggcttcctccgttccagagatattgcagtttaacctgttgggagtcccacttgtaggtgcagatgtttgtggcttcctggggaacacctcagaagaattgtgcgtaagatggactcaactgggcgccttctacccttttatgcgcaatcacaactcactgacatctttgcctcaagaaccgtactcatttagtgagccagcacagcaggccatgaggaaggctcttggcctgagatatgcacttctgccgcatctgtacacccttttccaccaggctcatgtccatggagagactgttgcacgacctctgttcttggagttcccaaaagactcttccacgtggacagtcgatcaccagatgctgtggggcgaggctctgctgattacacctgtattgcaacctggtaaggccgaagttaccgggtactttccattggggacctggtatgatctgcaaacagtcccggttgaagctcttggaagtcttccacctccacctgctgcaccaagggagcctgcgatccactctgaaggacagtgggtaactttgcctgcaccgctggacaccatcaatgtccatctgcgcgaaggctacatcataccacttcaaggtcctggactgaccactacagagtctagaaaacaaccaatggctcttgctgttgcactgactaaaagcggcgaagcaaggggtgagctgttctgggacgacggagagtcactggaggtactcgaacgaggcgcgtatacgcaggtcatttttgaggctcgcaataatacgatcgttaacgagctggtccacgtcacttcagaaggtgcaggccttcagttgggcaaggtaactgtcctgggagttgctacagcaccgcagcaggtcttgtccaacggacggcccgtaagcaactttacctatagtcctgataccaaagttctggacatctgcgttgctctgctgatgggtgagcagttcctggtatcatggtgc

SEQ ID NO: 682 - protein, 944 aa, synthetic construct
  REGION 1..944: note = Variant of the Homo Sapiens Lysosomal alpha-glucosidase
MEWSWVFLFFLSVTTGVHSGHILWHDFSTVPRELSGSSQVLEETHPAHQWGASRPGPRDAQLHPGRPRAVPTQCDVPENSRFDCAPEKAITQEQCEARGCCYIPAKQGLQGAQMGQPWCFFPPSYPSYKLENLSQSEMGYTATLTRTTPSFFPKDILTLRLDVMMETENRLHFTIKDPANRRYEVPLETPHVHSRAPSPLYSVEFSEEPFGVIVRRQLDGRVLLNTTVAPLFFADQFLQLSTSLPSQYITGLAEHLSPLMLSTSWNKITLWNRDLAPTPGANLYGSHPFYLALEDGGSAHGVFLLNSNAMDVVLQPSPALSWRSTGGILDVYIFLGPEPKSVVQQYLDVVGYPFMPPYWGLGFHLCRWGYSSTAITRQVVENMTRAHFPLDVQWNDLDYMDSRRDFTFNKDGFRDFPAMVQELHQGGRRYMMIVDPGISSSGPAGSYRPYDEGLRRGVFITNETGQPLIGKVWPGSTAFPDFTNPEALAWWEDMVAEFHDQVPFDGMWIDMNEPSNFIRGSVDGCPNNELENPPYVPGVVGGTLQAATICASSHQFLSTHYNLHNLYGTTEAIASHRALVKARGTRPFVISRSTFAGHGRYAGHWTGDVWSSWEQLASSVPEILQFNLLGVPLVGADVCGFLGNTSEELCVRWTQLGAFYPFMRNHNSLTSLPQEPYSFSEPAQQAMRKALGLRYALLPHLYTLFHQAHVHGETVARPLFLEFPKDSSTWTVDHQMLWGEALLITPVLQPGKAEVTGYFPLGTWYDLQTVPVEALGSLPPPPAAPREPAIHSEGQWVTLPAPLDTINVHLREGYIIPLQGPGLTTTESRKQPMALAVALTKSGEARGELFWDDGESLEVLERGAYTQVIFEARNNTIVNELVHVTSEGAGLQLGKVTVLGVATAPQQVLSNGRPVSNFTYSPDTKVLDICVALLMGEQFLVSWC

SEQ ID NO: 683 - DNA, 2832 bp, synthetic construct
  misc_feature 1..2832: note = Variant of the Homo Sapiens Lysosomal alpha-glucosidase
  source 1..2832: mol_type = other DNA
atggaatggagctgggtctttctcttcttcctgtcagtaacgactggtgtccactccggacacattctgtggcatgatttttctaccgtgcctagagagctttccggttcaagtcaagtcctcgaagaaacacatccagcccatcaggttggcgcatctaggccgggccctcgggacgctcaactccacccagggagacctagggccgttcccactcagtgcgacgtgccagagaactcacgcttcgattgtgcacctgagaaggctatcacgcaagagcagtgcgaggcccgcggatgttgttacataccggctaaacaggggctgcagggtgcgcagatgggccaaccttggtgcttcttcccaccatcctatccgagttacaagctggagaatctctcccagtctgaaatgggatataccgcaacactgactcggaccaccccctccttctttcccaaagatatcttgactctgagacttgacgtaatgatggagacagaaaacaggctccactttaccattaaggaccctgccaatcgccgatacgaggtgcctctggaaacaccacacgtgcacagtagagctccatcacctctgtattctgtcgagttctccgaagagccgtttggcgttatcgtcaggaggcagctcgacgggcgagtgcttctgaacacgactgtggccccgttgttctttgcggatcagtttctgcaactgtcaacaagtctcccttctcagtacattaccgggcttgcagagcatctgtccccactcatgctgagtacttcatggaacaaaatcacactgtggaatagagaccttgctcctactccaggagccaacttgtatggttctcaccctttctacttggccctggaagatggcggatcagcgcatggcgtattcctcctgaattccaacgcaatggacgttgttcttcagccatctcctgctttgagttggagatctacaggcgggatactggacgtctacatctttctgggtccagagcctaaatccgtagtgcagcagtatcttgatgtcgtcggatacccgtttatgccaccatattggggcctggggttccacttgtgccgctggggatattcatccaccgccattacacgacaagttgttgagaatatgaccagggcacattttcctctggatgtacagtggaacgacctggactacatggatagtcgccgcgacttcaccttcaataaggatgggttcagagactttcctgctatggtccaagaacttcaccagggaggcaggaggtacatgatgatcgtagatccgggaatttcttcttctggcccagccggttcatacagaccgtatgacgaaggactgcgacgaggcgtctttatcacgaacgagactggtcagcctttgataggcaaggtttggccagggtccaccgctttcccggatttcacaaatcctgaggcactggcctggtgggaagatatggtcgccgagtttcacgaccaggtcccatttgacgggatgtggatcgacatgaacgagccatccaacttcattagaggaagttgcgatggctgtccgaataatgagctggaaaaccctccttacgtaccaggcgttgttggtgggactcttcaagctgcgacgatttgcgcatcctcccatcagttcctgtcaacccactataacttgcacaatctgtacgggacaacagaggctatcgccagtcatagggccctggtaaaagctagaggaacacgccctttcgttatctctcgctcaacttttgcaggccacggtaggtatgccggacattggaccggcgacgtctggagttcttgggaacagctggcttcctccgttccagagatattgcagtttaacctgttgggagtcccacttgtaggtgcagatgtttgtggcttcctggggaacacctcagaagaattgtgcgtaagatggactcaactgggcgccttctacccttttatgcgcaatcacaactcactgacatctttgcctcaagaaccgtactcatttagtgagccagcacagcaggccatgaggaaggctcttggcctgagatatgcacttctgccgcatctgtacacccttttccaccaggctcatgtccatggagagactgttgcacgacctctgttcttggagttcccaaaagactcttccacgtggacagtcgatcaccagatgctgtggggcgaggctctgctgattacacctgtattgcaacctggtaaggccgaagttaccgggtactttccattggggacctggtatgatctgcaaacagtcccggttgaagctcttggaagtcttccacctccacctgctgcaccaagggagcctgcgatccactctgaaggacagtgggtaactttgcctgcaccgctggacaccatcaatgtccatctgcgcgaaggctacatcataccacttcaaggtcctggactgaccactacagagtctagaaaacaaccaatggctcttgctgttgcactgactaaaagcggcgaagcaaggggtgagctgttctgggacgacggagagtcactggaggtactcgaacgaggcgcgtatacgcaggtcatttttgaggctcgcaataatacgatcgttaacgagctggtccacgtcacttcagaaggtgcaggccttcagttgggcaaggtaactgtcctgggagttgctacagcaccgcagcaggtcttgtccaacggacggcccgtaagcaactttacctatagtcctgataccaaagttctggacatctgcgttgctctgctgatgggtgagcagttcctggtatcatggtgc

SEQ ID NO: 684 - protein, 944 aa, synthetic construct
  REGION 1..944: note = Variant of the Homo Sapiens Lysosomal alpha-glucosidase
MEWSWVFLFFLSVTTGVHSGHILWHDFSTVPRELSGSSQVLEETHPAHQVGASRPGPRDAQLHPGRPRAVPTQCDVPENSRFDCAPEKAITQEQCEARGCCYIPAKQGLQGAQMGQPWCFFPPSYPSYKLENLSQSEMGYTATLTRTTPSFFPKDILTLRLDVMMETENRLHFTIKDPANRRYEVPLETPHVHSRAPSPLYSVEFSEEPFGVIVRRQLDGRVLLNTTVAPLFFADQFLQLSTSLPSQYITGLAEHLSPLMLSTSWNKITLWNRDLAPTPGANLYGSHPFYLALEDGGSAHGVFLLNSNAMDVVLQPSPALSWRSTGGILDVYIFLGPEPKSVVQQYLDVVGYPFMPPYWGLGFHLCRWGYSSTAITRQVVENMTRAHFPLDVQWNDLDYMDSRRDFTFNKDGFRDFPAMVQELHQGGRRYMMIVDPGISSSGPAGSYRPYDEGLRRGVFITNETGQPLIGKVWPGSTAFPDFTNPEALAWWEDMVAEFHDQVPFDGMWIDMNEPSNFIRGSCDGCPNNELENPPYVPGVVGGTLQAATICASSHQFLSTHYNLHNLYGTTEAIASHRALVKARGTRPFVISRSTFAGHGRYAGHWTGDVWSSWEQLASSVPEILQFNLLGVPLVGADVCGFLGNTSEELCVRWTQLGAFYPFMRNHNSLTSLPQEPYSFSEPAQQAMRKALGLRYALLPHLYTLFHQAHVHGETVARPLFLEFPKDSSTWTVDHQMLWGEALLITPVLQPGKAEVTGYFPLGTWYDLQTVPVEALGSLPPPPAAPREPAIHSEGQWVTLPAPLDTINVHLREGYIIPLQGPGLTTTESRKQPMALAVALTKSGEARGELFWDDGESLEVLERGAYTQVIFEARNNTIVNELVHVTSEGAGLQLGKVTVLGVATAPQQVLSNGRPVSNFTYSPDTKVLDICVALLMGEQFLVSWC

SEQ ID NO: 685 - DNA, 2832 bp, synthetic construct
  misc_feature 1..2832: note = Variant of the Homo Sapiens Lysosomal alpha-glucosidase
  source 1..2832: mol_type = other DNA
atggaatggagctgggtctttctcttcttcctgtcagtaacgactggtgtccactccggacacattctgtggcatgatttttctaccgtgcctagagagctttccggttcaagtcaagtcctcgaagaaacacatccagcccatcaggttggcgcatctaggccgggccctcgggacgctcaactccacccagggagacctagggccgttcccactcagtgcgacgtgccagagaactcacgcttcgattgtgcacctgagaaggctatcacgcaagagcagtgcgaggcccgcggatgttgttacataccggctaaacaggggctgcagggtgcgcagatgggccaaccttggtgcttcttcccaccatcctatccgagttacaagctggagaatctctcccagtctgaaatgggatataccgcaacactgactcggaccaccccctccttctttcccaaagatatcttgactctgagacttgacgtaatgatggagacagaaaacaggctccactttaccattaaggaccctgccaatcgccgatacgaggtgcctctggaaacaccacacgtgcacagtagagctccatcacctctgtattctgtcgagttctccgaagagccgtttggcgttatcgtcaggaggcagctcgacgggcgagtgcttctgaacacgactgtggccccgttgttctttgcggatcagtttctgcaactgtcaacaagtctcccttctcagtacattaccgggcttgcagagcatctgtccccactcatgctgagtacttcatggaacaaaatcacactgtggaatagagaccttgctcctactccaggagccaacttgtatggttctcaccctttctacttggccctggaagatggcggatcagcgcatggcgtattcctcctgaattccaacgcaatggacgttgttcttcagccatctcctgctttgagttggagatctacaggcgggatactggacgtctacatctttctgggtccagagcctaaatccgtagtgcagcagtatcttgatgtcgtcggatacccgtttatgccaccatattggggcctggggttccacttgtgccgctggggatattcatccaccgccattacacgacaagttgttgagaatatgaccagggcacattttcctctggatgtacagtggaacgacctggactacatggatagtcgccgcgacttcaccttcaataaggatgggttcagagactttcctgctatggtccaagaacttcaccagggaggcaggaggtacatgatgatcgtagatccgggaatttcttcttctggcccagccggttcatacagaccgtatgacgaaggactgcgacgaggcgtctttatcacgaacgagactggtcagcctttgataggcaaggtttggccagggtccaccgctttcccggatttcacaaatcctacagcactggcctggtgggaagatatggtcgccgagtttcacgaccaggtcccatttgacgggatgtggatcgacatgaacgagccatccaacttcattagaggaagtgtggatggctgtccgaataatgagctggaaaaccctccttacgtaccaggcgttgttggtgggactcttcaagctgcgacgatttgcgcatcctcccatcagttcctgtcaacccactataacttgcacaatctgtacgggacaacagaggctatcgccagtcatagggccctggtaaaagctagaggaacacgccctttcgttatctctcgctcaacttttgcaggccacggtaggtatgccggacattggaccggcgacgtctggagttcttgggaacagctggcttcctccgttccagagatattgcagtttaacctgttgggagtcccacttgtaggtgcagatgtttgtggcttcctggggaacacctcagaagaattgtgcgtaagatggactcaactgggcgccttctacccttttatgcgcaatcacaactcactgacatctttgcctcaagaaccgtactcatttagtgagccagcacagcaggccatgaggaaggctcttggcctgagatatgcacttctgccgcatctgtacacccttttccaccaggctcatgtccatggagagactgttgcacgacctctgttcttggagttcccaaaagactcttccacgtggacagtcgatcaccagatgctgtggggcgaggctctgctgattacacctgtattgcaacctggtaaggccgaagttaccgggtactttccattggggacctggtatgatctgcaaacagtcccggttgaagctcttggaagtcttccacctccacctgctgcaccaagggagcctgcgatccactctgaaggacagtgggtaactttgcctgcaccgctggacaccatcaatgtccatctgcgcgaaggctacatcataccacttcaaggtcctggactgaccactacagagtctagaaaacaaccaatggctcttgctgttgcactgactaaaagcggcgaagcaaggggtgagctgttctgggacgacggagagtcactggaggtactcgaacgaggcgcgtatacgcaggtcatttttgaggctcgcaataatacgatcgttaacgagctggtccacgtcacttcagaaggtgcaggccttcagttgggcaaggtaactgtcctgggagttgctacagcaccgcagcaggtcttgtccaacggacggcccgtaagcaactttacctatagtcctgataccaaagttctggacatctgcgttgctctgctgatgggtgagcagttcctggtatcatggtgc

SEQ ID NO: 686 - protein, 944 aa, synthetic construct
  REGION 1..944: note = Variant of the Homo Sapiens Lysosomal alpha-glucosidase
MEWSWVFLFFLSVTTGVHSGHILWHDFSTVPRELSGSSQVLEETHPAHQVGASRPGPRDAQLHPGRPRAVPTQCDVPENSRFDCAPEKAITQEQCEARGCCYIPAKQGLQGAQMGQPWCFFPPSYPSYKLENLSQSEMGYTATLTRTTPSFFPKDILTLRLDVMMETENRLHFTIKDPANRRYEVPLETPHVHSRAPSPLYSVEFSEEPFGVIVRRQLDGRVLLNTTVAPLFFADQFLQLSTSLPSQYITGLAEHLSPLMLSTSWNKITLWNRDLAPTPGANLYGSHPFYLALEDGGSAHGVFLLNSNAMDVVLQPSPALSWRSTGGILDVYIFLGPEPKSVVQQYLDVVGYPFMPPYWGLGFHLCRWGYSSTAITRQVVENMTRAHFPLDVQWNDLDYMDSRRDFTFNKDGFRDFPAMVQELHQGGRRYMMIVDPGISSSGPAGSYRPYDEGLRRGVFITNETGQPLIGKVWPGSTAFPDFTNPTALAWWEDMVAEFHDQVPFDGMWIDMNEPSNFIRGSVDGCPNNELENPPYVPGVVGGTLQAATICASSHQFLSTHYNLHNLYGTTEAIASHRALVKARGTRPFVISRSTFAGHGRYAGHWTGDVWSSWEQLASSVPEILQFNLLGVPLVGADVCGFLGNTSEELCVRWTQLGAFYPFMRNHNSLTSLPQEPYSFSEPAQQAMRKALGLRYALLPHLYTLFHQAHVHGETVARPLFLEFPKDSSTWTVDHQMLWGEALLITPVLQPGKAEVTGYFPLGTWYDLQTVPVEALGSLPPPPAAPREPAIHSEGQWVTLPAPLDTINVHLREGYIIPLQGPGLTTTESRKQPMALAVALTKSGEARGELFWDDGESLEVLERGAYTQVIFEARNNTIVNELVHVTSEGAGLQLGKVTVLGVATAPQQVLSNGRPVSNFTYSPDTKVLDICVALLMGEQFLVSWC

SEQ ID NO: 687 - DNA, 2832 bp, synthetic construct
  misc_feature 1..2832: note = Variant of the Homo Sapiens Lysosomal alpha-glucosidase
  source 1..2832: mol_type = other DNA
atggaatggagctgggtctttctcttcttcctgtcagtaacgactggtgtccactccggacacattctgtggcatgatttttctaccgtgcctagagagctttccggttcaagtcaagtcctcgaagaaacacatccagcccatcaggttggcgcatctaggccgggccctcgggacgctcaactccacccagggagacctagggccgttcccactcagtgcgacgtgccagagaactcacgcttcgattgtgcacctgagaaggctatcacgcaagagcagtgcgaggcccgcggatgttgttacataccggctaaacaggggctgcagggtgcgcagatgggccaaccttggtgcttcttcccaccatcctatccgagttacaagctggagaatctctcccagtctgaaatgggatataccgcaacactgactcggaccaccccctccttctttcccaaagatatcttgactctgagacttgacgtaatgatggagacagaaaacaggctccactttaccattaaggaccctgccaatcgccgatacgaggtgcctctggaaacaccacacgtgcacagtagagctccatcacctctgtattctgtcgagttctccgaagagccgtttggcgttatcgtcaggaggcagctcgacgggcgagtgcttctgaacacgactgtggccccgttgttctttgcggatcagtttctgcaactgtcaacaagtctcccttctcagtacattaccgggcttgcagagcatctgtccccactcatgctgagtacttcatggaacaaaatcacactgtggaatagagaccttgctcctactccaggagccaacttgtatggttctcaccctttctacttggccctggaagatggcggatcagcgcatggcgtattcctcctgaattccaacgcaatggacgttgttcttcagccatctcctgctttgagttggagatctacaggcgggatactggacgtctacatctttctgggtccagagcctaaatccgtagtgcagcagtatcttgatgtcgtcggatacccgtttatgccaccatattggggcctggggttccacttgtgccgctggggatattcatccaccgccattacacgacaagttgttgagaatatgaccagggcacattttcctctggatgtacagtggaacgacctggactacatggatagtcgccgcgacttcaccttcaataaggatgggttcagagactttcctgctatggtccaagaacttcaccagggaggcaggaggtacatgatgatcgtagatccgggaatttcttcttctggcccagccggttcatacagaccgtatgacgaaggactgcgacgaggcgtctttatcacgaacgagactggtcagcctttgataggcaaggtttggccagggtccaccgctttcccggatttcacaaatcctgaggcactggcctggtgggaagatatggtcgccgagtttcacgaccaggtcccatttgacgggatgtggatcgacatgaacgagccatccaacttcattagaggaagtgtggatggctgtccgaataatgagctggaaaaccctccttacgtaccaggcgttgttggtgggactcttcaagctgcgacgatttgcgcatcctcccatcagttcctgtcaacccactataacttgcacaatctgtacgggacaacagaggctatcgccagtcatagggccctggtaaaagctagaggaacacgccctttcgttatctctcgctcaacttttgcaggccacggtaggtatgccggacattggaccggcgacgtctggagttcttgggaacagctggcttcctccgttccagagatattgcagtttaacctgttgggagtcccacttgtaggtgcagatgtttgtggcttcctggggaacacctcagaagaattgtgcgtaagatggactcaactgggcgccttctacccttttatgcgcaatcacaactcactgacatctttgcctcaagaaccgtactcatttagtgagccagcacagcaggccatgaggaaggctcttggcctgagatatgcacttctgccgcatctgtacacccttttccaccaggctcatgtccatggagagactgttgcacgacctctgttcttggagttcccaaaagactcttccacgtggacagtcgatcaccagatgctgtggggcgaggctctgctgattacacctgtattgcaacctggtaaggccgaagttaccgggtactttccattggggacctggtatgatctgcaaacagtcccggttgaagctcttggaagtcttccacctccacctgctgcaccaagggagcctgcgatccactctgaaggacagtgggtaactttgcctgcaccgctggacaccatcaatgtccatctgcgcgaaggctacatcataccacttcaaggtcctggactgaccactacagagtctagaaaacaaccaatggctcttgctgttgcactgactaaaagcggcgaagcaaggggtgagctgttctgggacgacggagagtcactggaggtactcgaacgaggcgcgtatacgcaggtcatttttgaggctcgcaataatacgatcgttaacgagctggtccacgtcacttcagaaggtgcaggccttcagttgggcaaggtaactgtcctgggagttgctacagcaccgcagcaggtcttgtccaacggacggcccgtaagcaactttacctatagtcctgataccaaagttctggacatctgcgttagcctgctgatgggtgagcagttcctggtatcatggtgc

SEQ ID NO: 688 - protein, 944 aa, synthetic construct
  REGION 1..944: note = Variant of the Homo Sapiens Lysosomal alpha-glucosidase
MEWSWVFLFFLSVTTGVHSGHILWHDFSTVPRELSGSSQVLEETHPAHQVGASRPGPRDAQLHPGRPRAVPTQCDVPENSRFDCAPEKAITQEQCEARGCCYIPAKQGLQGAQMGQPWCFFPPSYPSYKLENLSQSEMGYTATLTRTTPSFFPKDILTLRLDVMMETENRLHFTIKDPANRRYEVPLETPHVHSRAPSPLYSVEFSEEPFGVIVRRQLDGRVLLNTTVAPLFFADQFLQLSTSLPSQYITGLAEHLSPLMLSTSWNKITLWNRDLAPTPGANLYGSHPFYLALEDGGSAHGVFLLNSNAMDVVLQPSPALSWRSTGGILDVYIFLGPEPKSVVQQYLDVVGYPFMPPYWGLGFHLCRWGYSSTAITRQVVENMTRAHFPLDVQWNDLDYMDSRRDFTFNKDGFRDFPAMVQELHQGGRRYMMIVDPGISSSGPAGSYRPYDEGLRRGVFITNETGQPLIGKVWPGSTAFPDFTNPEALAWWEDMVAEFHDQVPFDGMWIDMNEPSNFIRGSVDGCPNNELENPPYVPGVVGGTLQAATICASSHQFLSTHYNLHNLYGTTEAIASHRALVKARGTRPFVISRSTFAGHGRYAGHWTGDVWSSWEQLASSVPEILQFNLLGVPLVGADVCGFLGNTSEELCVRWTQLGAFYPFMRNHNSLTSLPQEPYSFSEPAQQAMRKALGLRYALLPHLYTLFHQAHVHGETVARPLFLEFPKDSSTWTVDHQMLWGEALLITPVLQPGKAEVTGYFPLGTWYDLQTVPVEALGSLPPPPAAPREPAIHSEGQWVTLPAPLDTINVHLREGYIIPLQGPGLTTTESRKQPMALAVALTKSGEARGELFWDDGESLEVLERGAYTQVIFEARNNTIVNELVHVTSEGAGLQLGKVTVLGVATAPQQVLSNGRPVSNFTYSPDTKVLDICVSLLMGEQFLVSWC

SEQ ID NO: 689 - DNA, 2832 bp, synthetic construct
  misc_feature 1..2832: note = Variant of the Homo Sapiens Lysosomal alpha-glucosidase
  source 1..2832: mol_type = other DNA
atggaatggagctgggtctttctcttcttcctgtcagtaacgactggtgtccactccggacacattctgtggcatgatttttcttgggtgcctagagagctttccggttcaagtcaagtcctcgaagaaacacatccagcccatcaggttggcgcatctaggccgggccctcgggacgctcaactccacccagggagacctagggccgttcccactcagtgcgacgtgccagagaactcacgcttcgattgtgcacctgagaaggctatcacgcaagagcagtgcgaggcccgcggatgttgttacataccggctaaacaggggctgcagggtgcgcagatgggccaaccttggtgcttcttcccaccatcctatccgagttacaagctggagaatctctcccagtctgaaatgggatataccgcaacactgactcggaccaccccctccttctttcccaaagatatcttgactctgagacttgacgtaatgatggagacagaaaacaggctccactttaccattaaggaccctgccaatcgccgatacgaggtgcctctggaaacaccacacgtgcacagtagagctccatcacctctgtattctgtcgagttctccgaagagccgtttggcgttatcgtcaggaggcagctcgacgggcgagtgcttctgaacacgactgtggccccgttgttctttgcggatcagtttctgcaactgtcaacaagtctcccttctcagtacattaccgggcttgcagagcatctgtccccactcatgctgagtacttcatggaacaaaatcacactgtggaatagagaccttgctcctactccaggagccaacttgtatggttctcaccctttctacttggccctggaagatggcggatcagcgcatggcgtattcctcctgaattccaacgcaatggacgttgttcttcagccatctcctgctttgagttggagatctacaggcgggatactggacgtctacatctttctgggtccagagcctaaatccgtagtgcagcagtatcttgatgtcgtcggatacccgtttatgccaccatattggggcctggggttccacttgtgccgctggggatattcatccaccgccattacacgacaagttgttgagaatatgaccagggcacattttcctctggatgtacagtggaacgacctggactacatggatagtcgccgcgacttcaccttcaataaggatgggttcagagactttcctgctatggtccaagaacttcaccagggaggcaggaggtacatgatgatcgtagatccgggaatttcttcttctggcccagccggttcatacagaccgtatgacgaaggactgcgacgaggcgtctttatcacgaacgagactggtcagcctttgataggcaaggtttggccagggtccaccgctttcccggatttcacaaatcctgaggcactggcctggtgggaagatatggtcgccgagtttcacgaccaggtcccatttgacgggatgtggatcgacatgaacgagccatccaacttcattagaggaagtgtggatggctgtccgaataatgagctggaaaaccctccttacgtaccaggcgttgttggtgggactcttcaagctgcgacgatttgcgcatcctcccatcagttcctgtcaacccactataacttgcacaatctgtacgggacaacagaggctatcgccagtcatagggccctggtaaaagctagaggaacacgccctttcgttatctctcgctcaacttttgcaggccacggtaggtatgccggacattggaccggcgacgtctggagttcttgggaacagctggcttcctccgttccagagatattgcagtttaacctgttgggagtcccacttgtaggtgcagatgtttgtggcttcctggggaacacctcagaagaattgtgcgtaagatggactcaactgggcgccttctacccttttatgcgcaatcacaactcactgacatctttgcctcaagaaccgtactcatttagtgagccagcacagcaggccatgaggaaggctcttggcctgagatatgcacttctgccgcatctgtacacccttttccaccaggctcatgtccatggagagactgttgcacgacctctgttcttggagttcccaaaagactcttccacgtggacagtcgatcaccagatgctgtggggcgaggctctgctgattacacctgtattgcaacctggtaaggccgaagttaccgggtactttccattggggacctggtatgatctgcaaacagtcccggttgaagctcttggaagtcttccacctccacctgctgcaccaagggagcctgcgatccactctgaaggacagtgggtaactttgcctgcaccgctggacaccatcaatgtccatctgcgcgaaggctacatcataccacttcaaggtcctggactgaccactacagagtctagaaaacaaccaatggctcttgctgttgcactgactaaaagcggcgaagcaaggggtgagctgttctgggacgacggagagtcactggaggtactcgaacgaggcgcgtatacgcaggtcatttttgaggctcgcaataatacgatcgttaacgagctggtccacgtcacttcagaaggtgcaggccttcagttgggcaaggtaactgtcctgggagttgctacagcaccgcagcaggtcttgtccaacggacggcccgtaagcaactttacctatagtcctgataccaaagttctggacatctgcgttgctctgctgatgggtgagcagttcctggtatcatggtgc

SEQ ID NO: 690 - protein, 944 aa, synthetic construct
  REGION 1..944: note = Variant of the Homo Sapiens Lysosomal alpha-glucosidase
MEWSWVFLFFLSVTTGVHSGHILWHDFSWVPRELSGSSQVLEETHPAHQVGASRPGPRDAQLHPGRPRAVPTQCDVPENSRFDCAPEKAITQEQCEARGCCYIPAKQGLQGAQMGQPWCFFPPSYPSYKLENLSQSEMGYTATLTRTTPSFFPKDILTLRLDVMMETENRLHFTIKDPANRRYEVPLETPHVHSRAPSPLYSVEFSEEPFGVIVRRQLDGRVLLNTTVAPLFFADQFLQLSTSLPSQYITGLAEHLSPLMLSTSWNKITLWNRDLAPTPGANLYGSHPFYLALEDGGSAHGVFLLNSNAMDVVLQPSPALSWRSTGGILDVYIFLGPEPKSVVQQYLDVVGYPFMPPYWGLGFHLCRWGYSSTAITRQVVENMTRAHFPLDVQWNDLDYMDSRRDFTFNKDGFRDFPAMVQELHQGGRRYMMIVDPGISSSGPAGSYRPYDEGLRRGVFITNETGQPLIGKVWPGSTAFPDFTNPEALAWWEDMVAEFHDQVPFDGMWIDMNEPSNFIRGSVDGCPNNELENPPYVPGVVGGTLQAATICASSHQFLSTHYNLHNLYGTTEAIASHRALVKARGTRPFVISRSTFAGHGRYAGHWTGDVWSSWEQLASSVPEILQFNLLGVPLVGADVCGFLGNTSEELCVRWTQLGAFYPFMRNHNSLTSLPQEPYSFSEPAQQAMRKALGLRYALLPHLYTLFHQAHVHGETVARPLFLEFPKDSSTWTVDHQMLWGEALLITPVLQPGKAEVTGYFPLGTWYDLQTVPVEALGSLPPPPAAPREPAIHSEGQWVTLPAPLDTINVHLREGYIIPLQGPGLTTTESRKQPMALAVALTKSGEARGELFWDDGESLEVLERGAYTQVIFEARNNTIVNELVHVTSEGAGLQLGKVTVLGVATAPQQVLSNGRPVSNFTYSPDTKVLDICVALLMGEQFLVSWC

SEQ ID NO: 691 - DNA, 2832 bp, synthetic construct
  misc_feature 1..2832: note = Variant of the Homo Sapiens Lysosomal alpha-glucosidase
  source 1..2832: mol_type = other DNA
atggaatggagctgggtctttctcttcttcctgtcagtaacgactggtgtccactccggacacattctgtggcatgatttttctaccgtgcctagagagctttccggttcaagtcaagtcctcgaagaaacacatccagcccatcaggttggcgcatctaggccgggccctcgggacgctcaactccacccagggagacctagggccgttcccactcagtgcgacgtgccagagaactcacgcttcgattgtgcacctgagaaggctatcacgcaagagcagtgcgaggcccgcggatgttgttacataccggctaaacaggggctgcagggtgcgcagatgggccaaccttggtgcttcttcccaccatcctatccgagttacaagctggagaatctctcccagtctgaaatgggatataccgcaacactgactcggaccaccccctccttctttcccaaagatatcttgactctgagacttgacgtaatgatggagacagaaaacaggctccactttaccattaaggaccctgccaatcgccgatacgaggtgcctctggaaacaccacacgtgcacagtagagctccatcacctctgtattctgtcgagttctccgaagagccgtttggcgttatcgtcaggaggcagctcgacgggcgagtgcttctgaacacgactgtggccccgttgttctttgcggatcagtttctgcaactgtcaacaagtctcccttctcagtacattaccgggcttgcagagcatctgtccccactcatgctgagtacttcatggaacaaaatcacactgtggaatagagaccttgctcctactccaggagccaacttgtatggttctcaccctttctacttggccctggaagatggcggatcagcgcatggcgtattcctcctgaattccaacgcaatggacgttgttcttcagccatctcctgctttgagttggagatctacaggcgggatactggacgtctacatctttctgggtccagagcctaaatccgtagtgcagcagtatcttgatgtcgtcggatacccgtttatgccaccatattggggcctggggttccacttgtgccgctggggatattcatccaccgccattacacgacaagttgttgagaatatgaccagggcacattttcctctggatgtacagtggaacgacctggactacatggatagtcgccgcgacttcaccttcaataaggatgggttcagagactttcctgctatggtccaagaacttcaccagggaggcaggaggtacatgatgatcgtagatccgggaatttcttcttctggcccagccggttcatacagaccgtatgacgaaggactgcgacgaggcgtctttatcacgaacgagactggtcagcctttgataggcaaggtttggccagggtccaccgctttcccggatttcacaaatcctgaggcactggcctggtgggaagatatggtcgccgagtttcacgaccaggtcccatttgacgggatgtggatcgacatgaacgagccatccaacttcattagaggaagtgtggatggctgtccgaataatgagctggaaaaccctccttacgtaccaggcgttgttggtgggactcttcaagctgcgacgatttgcgcatcctcccatcagttcctgtcaacccactataacttgcacaatctgtacgggacaacagaggctatcgccagtcatagggccctggtaaaagctagaggaacacgccctttcgttatctctcgctcaacttttgcaggccacggtaggtatgccggacattggaccggcgacgtctggagttcttgggaacagctggcttcctccgttccagagatattgcagtttaacctgttgggagtcccacttgtaggtgcagatgtttgtggcttcctggggaacacctcagaagaattgtgcgtaagatggactcaactgggcgccttctacccttttatgcgcaatcacaactcactgacatctttgcctcaagaaccgtactcatttagtgagccagcacagcaggccatgaggaaggctcttggcctgagatatgcacttctgccgcatctgtacacccttttccaccaggctcatgtccatggagagactgttgcacgacctctgttcttggagttcccaaaagactcttccacgtggacagtcgatcaccagatgctgtggggcgaggctctgctgattacacctgtattgcaacctggtaaggccgaagttaccgggtactttccattggggacctggtatgatctgcaaacagtcccggttgaagctcttggaagtcttccacctccacctgctgcaccaagggagcctgcgatccactctgaaggacagtgggtaactttgcctgcaccgctggacaccatcaatgtccatctgcgcgggggctacatcataccacttcaaggtcctggactgaccactacagagtctagaaaacaaccaatggctcttgctgttgcactgactaaaagcggcgaagcaaggggtgagctgttctgggacgacggagagtcactggaggtactcgaacgaggcgcgtatacgcaggtcatttttgaggctcgcaataatacgatcgttaacgagctggtccacgtcacttcagaaggtgcaggccttcagttgggcaaggtaactgtcctgggagttgctacagcaccgcagcaggtcttgtccaacggacggcccgtaagcaactttacctatagtcctgataccaaagttctggacatctgcgttgctctgctgatgggtgagcagttcctggtatcatggtgc

SEQ ID NO: 692 - protein, 944 aa, synthetic construct
  REGION 1..944: note = Variant of the Homo Sapiens Lysosomal alpha-glucosidase
MEWSWVFLFFLSVTTGVHSGHILWHDFSTVPRELSGSSQVLEETHPAHQVGASRPGPRDAQLHPGRPRAVPTQCDVPENSRFDCAPEKAITQEQCEARGCCYIPAKQGLQGAQMGQPWCFFPPSYPSYKLENLSQSEMGYTATLTRTTPSFFPKDILTLRLDVMMETENRLHFTIKDPANRRYEVPLETPHVHSRAPSPLYSVEFSEEPFGVIVRRQLDGRVLLNTTVAPLFFADQFLQLSTSLPSQYITGLAEHLSPLMLSTSWNKITLWNRDLAPTPGANLYGSHPFYLALEDGGSAHGVFLLNSNAMDVVLQPSPALSWRSTGGILDVYIFLGPEPKSVVQQYLDVVGYPFMPPYWGLGFHLCRWGYSSTAITRQVVENMTRAHFPLDVQWNDLDYMDSRRDFTFNKDGFRDFPAMVQELHQGGRRYMMIVDPGISSSGPAGSYRPYDEGLRRGVFITNETGQPLIGKVWPGSTAFPDFTNPEALAWWEDMVAEFHDQVPFDGMWIDMNEPSNFIRGSVDGCPNNELENPPYVPGVVGGTLQAATICASSHQFLSTHYNLHNLYGTTEAIASHRALVKARGTRPFVISRSTFAGHGRYAGHWTGDVWSSWEQLASSVPEILQFNLLGVPLVGADVCGFLGNTSEELCVRWTQLGAFYPFMRNHNSLTSLPQEPYSFSEPAQQAMRKALGLRYALLPHLYTLFHQAHVHGETVARPLFLEFPKDSSTWTVDHQMLWGEALLITPVLQPGKAEVTGYFPLGTWYDLQTVPVEALGSLPPPPAAPREPAIHSEGQWVTLPAPLDTINVHLRGGYIIPLQGPGLTTTESRKQPMALAVALTKSGEARGELFWDDGESLEVLERGAYTQVIFEARNNTIVNELVHVTSEGAGLQLGKVTVLGVATAPQQVLSNGRPVSNFTYSPDTKVLDICVALLMGEQFLVSWC

SEQ ID NO: 693 - DNA, 2832 bp, synthetic construct
  misc_feature 1..2832: note = Variant of the Homo Sapiens Lysosomal alpha-glucosidase
  source 1..2832: mol_type = other DNA
atggaatggagctgggtctttctcttcttcctgtcagtaacgactggtgtccactccggacacattctgtggcatgatttttctaccgtgcctagagagctttccggttcaagtcaagtcctcgaagaaacacatccagcccatcaggttggcgcatctaggccgggccctcgggacgctcaactccacccagggagacctagggccgttcccactcagtgcgacgtgccagataactcacgcttcgattgtgcacctgagaaggctatcacgcaagagcagtgcgaggcccgcggatgttgttacataccggctaaacaggggctgcagggtgcgcagatgggccaaccttggtgcttcttcccaccatcctatccgagttacaagctggagaatctctcccagtctgaaatgggatataccgcaacactgactcggaccaccccctccttctttcccaaagatatcttgactctgagacttgacgtaatgatggagacagaaaacaggctccactttaccattaaggaccctgccaatcgccgatacgaggtgcctctggaaacaccacacgtgcacagtagagctccatcacctctgtattctgtcgagttctccgaagagccgtttggcgttatcgtcaggaggcagctcgacgggcgagtgcttctgaacacgactgtggccccgttgttctttgcggatcagtttctgcaactgtcaacaagtctcccttctcagtacattaccgggcttgcagagcatctgtccccactcatgctgagtacttcatggaacaaaatcacactgtggaatagagaccttgctcctactccaggagccaacttgtatggttctcaccctttctacttggccctggaagatggcggatcagcgcatggcgtattcctcctgaattccaacgcaatggacgttgttcttcagccatctcctgctttgagttggagatctacaggcgggatactggacgtctacatctttctgggtccagagcctaaatccgtagtgcagcagtatcttgatgtcgtcggatacccgtttatgccaccatattggggcctggggttccacttgtgccgctggggatattcatccaccgccattacacgacaagttgttgagaatatgaccagggcacattttcctctggatgtacagtggaacgacctggactacatggatagtcgccgcgacttcaccttcaataaggatgggttcagagactttcctgctatggtccaagaacttcaccagggaggcaggaggtacatgatgatcgtagatccgggaatttcttcttctggcccagccggttcatacagaccgtatgacgaaggactgcgacgaggcgtctttatcacgaacgagactggtcagcctttgataggcaaggtttggccagggtccaccgctttcccggatttcacaaatcctgaggcactggcctggtgggaagatatggtcgccgagtttcacgaccaggtcccatttgacgggatgtggatcgacatgaacgagccatccaacttcattagaggaagtgtggatggctgtccgaataatgagctggaaaaccctccttacgtaccaggcgttgttggtgggactcttcaagctgcgacgatttgcgcatcctcccatcagttcctgtcaacccactataacttgcacaatctgtacgggacaacagaggctatcgccagtcatagggccctggtaaaagctagaggaacacgccctttcgttatctctcgctcaacttttgcaggccacggtaggtatgccggacattggaccggcgacgtctggagttcttgggaacagctggcttcctccgttccagagatattgcagtttaacctgttgggagtcccacttgtaggtgcagatgtttgtggcttcctggggaacacctcagaagaattgtgcgtaagatggactcaactgggcgccttctacccttttatgcgcaatcacaactcactgacatctttgcctcaagaaccgtactcatttagtgagccagcacagcaggccatgaggaaggctcttggcctgagatatgcacttctgccgcatctgtacacccttttccaccaggctcatgtccatggagagactgttgcacgacctctgttcttggagttcccaaaagactcttccacgtggacagtcgatcaccagatgctgtggggcgaggctctgctgattacacctgtattgcaacctggtaaggccgaagttaccgggtactttccattggggacctggtatgatctgcaaacagtcccggttgaagctcttggaagtcttccacctccacctgctgcaccaagggagcctgcgatccactctgaaggacagtgggtaactttgcctgcaccgctggacaccatcaatgtccatctgcgcgaaggctacatcataccacttcaaggtcctggactgaccactacagagtctagaaaacaaccaatggctcttgctgttgcactgactaaaagcggcgaagcaaggggtgagctgttctgggacgacggagagtcactggaggtactcgaacgaggcgcgtatacgcaggtcatttttgaggctcgcaataatacgatcgttaacgagctggtccacgtcacttcagaaggtgcaggccttcagttgggcaaggtaactgtcctgggagttgctacagcaccgcagcaggtcttgtccaacggacggcccgtaagcaactttacctatagtcctgataccaaagttctggacatctgcgttgctctgctgatgggtgagcagttcctggtatcatggtgc

SEQ ID NO: 694 - protein, 944 aa, synthetic construct
  REGION 1..944: note = Variant of the Homo Sapiens Lysosomal alpha-glucosidase
MEWSWVFLFFLSVTTGVHSGHILWHDFSTVPRELSGSSQVLEETHPAHQVGASRPGPRDAQLHPGRPRAVPTQCDVPDNSRFDCAPEKAITQEQCEARGCCYIPAKQGLQGAQMGQPWCFFPPSYPSYKLENLSQSEMGYTATLTRTTPSFFPKDILTLRLDVMMETENRLHFTIKDPANRRYEVPLETPHVHSRAPSPLYSVEFSEEPFGVIVRRQLDGRVLLNTTVAPLFFADQFLQLSTSLPSQYITGLAEHLSPLMLSTSWNKITLWNRDLAPTPGANLYGSHPFYLALEDGGSAHGVFLLNSNAMDVVLQPSPALSWRSTGGILDVYIFLGPEPKSVVQQYLDVVGYPFMPPYWGLGFHLCRWGYSSTAITRQVVENMTRAHFPLDVQWNDLDYMDSRRDFTFNKDGFRDFPAMVQELHQGGRRYMMIVDPGISSSGPAGSYRPYDEGLRRGVFITNETGQPLIGKVWPGSTAFPDFTNPEALAWWEDMVAEFHDQVPFDGMWIDMNEPSNFIRGSVDGCPNNELENPPYVPGVVGGTLQAATICASSHQFLSTHYNLHNLYGTTEAIASHRALVKARGTRPFVISRSTFAGHGRYAGHWTGDVWSSWEQLASSVPEILQFNLLGVPLVGADVCGFLGNTSEELCVRWTQLGAFYPFMRNHNSLTSLPQEPYSFSEPAQQAMRKALGLRYALLPHLYTLFHQAHVHGETVARPLFLEFPKDSSTWTVDHQMLWGEALLITPVLQPGKAEVTGYFPLGTWYDLQTVPVEALGSLPPPPAAPREPAIHSEGQWVTLPAPLDTINVHLREGYIIPLQGPGLTTTESRKQPMALAVALTKSGEARGELFWDDGESLEVLERGAYTQVIFEARNNTIVNELVHVTSEGAGLQLGKVTVLGVATAPQQVLSNGRPVSNFTYSPDTKVLDICVALLMGEQFLVSWC

SEQ ID NO: 695 - DNA, 2832 bp, synthetic construct
  misc_feature 1..2832: note = Variant of the Homo Sapiens Lysosomal alpha-glucosidase
  source 1..2832: mol_type = other DNA
atggaatggagctgggtctttctcttcttcctgtcagtaacgactggtgtccactccggacacattctgtggcatgatttttctaccgtgcctagagagctttccggttcaagtcaagtcctcgaagaaacacatccagcccatcaggttggcgcatctaggccgggccctcgggacgctcaactccacccagggagacctagggccgttcccactcagtgcgacgtgccagagaactcacgcttcgattgtgcacctgagaaggctatcacgcaagagcagtgcgaggcccgcggatgttgttacataccggctaaacaggggctgcagggtgcgcagatgggccaaccttggtgcttcttcccaccatcctatccgagttacaagctggagaatctctcccagtctgaaatgggatataccgcaacactgactcggaccaccccctccttctttcccaaagatatcttgactctgagacttgacgtaatgatggagacagaaaacaggctccactttaccattaaggaccctgccaatcgccgatacgaggtgcctctggaaacaccacacgtgcacagtagagctccatcacctctgtattctgtcgagttctccgaagagccgtttggcgttatcgtcaggaggcagctcgacgggcgagtgcttctgaacacgactgtggccccgttgttctttgcggatcagtttctgcaactgtcaacaagtctcccttctcagtacattaccgggcttgcagagcatctgtccccactcatgctgagtacttcatggaacaaaatcacactgtggaatagagaccttgctcctactccaggagccaacttgtatggttctcaccctttctacttggccctggaagatggcggatcagcgcatggcgtattcctcctgaattccaacgcaatggacgttgttcttcagccatctcctgctttgagttggagatctacaggcgggatactggacgtctacatctttctgggtccagagcctaaatccgtagtgcagcagtatcttgatgtcgtcggatacccgtttatgccaccatattggggcctggggttccacttgtgccgctggggatattcatccaccgccattacacgacaagttgttgagaatatgaccagggcacattttcctctggatgtacagtggaacgacctggactacatggatagtcgccgcgacttcaccttcaataaggatgggttcagagactttcctgctatggtccaagaacttcaccagggaggcaggaggtacatgatgatcgtagatccgggaatttcttcttctggcccagccggttcatacagaccgtatgacgaaggactgcgacgaggcgtctttatcacgaacgagactggtcagcctttgataggcaaggtttggccagggtccaccgctttcccggatttcacaaatcctgaggcactggcctggtgggaagatatggtcgccgagtttcacgaccaggtcccatttgacgggatgtggatcgacatgaacgagccatccaacttcattagaggaagtgtggatggctgtccgaataatgagctggaaaaccctccttacgtaccaggcgttgttggtgggactcttcaagctgcgacgatttgcgcatcctcccatcagttcctgtcaacccactataacttgcacaatctgtacgggacaacagaggctatcgccagtcatagggccctggtaaaagctagaggaacacgccctttcgttatctctcgctcaacttttgcaggccacggtaggtatgccggacattggaccggcgacgtctggagttcttgggaacagctggcttcctccgttccagagatattgcagtttaacctgttgggagtcccacttgtaggtgcagatgtttgtggcttcctggggaacacctcagaagaattgtgcgtaagatggactcaactgggcgccttctacccttttatgcgcaatcacaactcactgacatctttgcctcaagaaccgtactcatttagtgagccagcacagcaggccatgaggaaggctcttggcctgagatatgcacttctgccgcatctgtacacccttttccaccaggctcatgtccatggagagactgttgcacgacctctgttcttggagttcccaaaagactcttccacgtggacagtcgatcaccagatgctgtggggcgaggctctgctgattacacctgtattgcaacctggtaaggccgaagttaccgggtactttccattggggacctggtatgatctgcaaacagtcccggttgaagctcttggaagtcttccacctccacctgctgcaccaagggagcctgcgatccactctgaaggacagtgggtaactttgcctgcaccgctggacaccatcaatgtccatctgcgcgaaggctacatcataccacttcaaggtcctggactgaccactacagagtctagaaaacaaccaatggctcttgctgttgcactgactaaaagcggcgaagcaaggggtgagctgttctgggacgacggagagtcactggaggtactcgaacgaggcgcgtatacgcaggtcatttttgatgctcgcaataatacgatcgttaacgagctggtccacgtcacttcagaaggtgcaggccttcagttgggcaaggtaactgtcctgggagttgctacagcaccgcagcaggtcttgtccaacggacggcccgtaagcaactttacctatagtcctgataccaaagttctggacatctgcgttgctctgctgatgggtgagcagttcctggtatcatggtgc

SEQ ID NO: 696 - protein, 944 aa, synthetic construct
  REGION 1..944: note = Variant of the Homo Sapiens Lysosomal alpha-glucosidase
MEWSWVFLFFLSVTTGVHSGHILWHDFSTVPRELSGSSQVLEETHPAHQVGASRPGPRDAQLHPGRPRAVPTQCDVPENSRFDCAPEKAITQEQCEARGCCYIPAKQGLQGAQMGQPWCFFPPSYPSYKLENLSQSEMGYTATLTRTTPSFFPKDILTLRLDVMMETENRLHFTIKDPANRRYEVPLETPHVHSRAPSPLYSVEFSEEPFGVIVRRQLDGRVLLNTTVAPLFFADQFLQLSTSLPSQYITGLAEHLSPLMLSTSWNKITLWNRDLAPTPGANLYGSHPFYLALEDGGSAHGVFLLNSNAMDVVLQPSPALSWRSTGGILDVYIFLGPEPKSVVQQYLDVVGYPFMPPYWGLGFHLCRWGYSSTAITRQVVENMTRAHFPLDVQWNDLDYMDSRRDFTFNKDGFRDFPAMVQELHQGGRRYMMIVDPGISSSGPAGSYRPYDEGLRRGVFITNETGQPLIGKVWPGSTAFPDFTNPEALAWWEDMVAEFHDQVPFDGMWIDMNEPSNFIRGSVDGCPNNELENPPYVPGVVGGTLQAATICASSHQFLSTHYNLHNLYGTTEAIASHRALVKARGTRPFVISRSTFAGHGRYAGHWTGDVWSSWEQLASSVPEILQFNLLGVPLVGADVCGFLGNTSEELCVRWTQLGAFYPFMRNHNSLTSLPQEPYSFSEPAQQAMRKALGLRYALLPHLYTLFHQAHVHGETVARPLFLEFPKDSSTWTVDHQMLWGEALLITPVLQPGKAEVTGYFPLGTWYDLQTVPVEALGSLPPPPAAPREPAIHSEGQWVTLPAPLDTINVHLREGYIIPLQGPGLTTTESRKQPMALAVALTKSGEARGELFWDDGESLEVLERGAYTQVIFDARNNTIVNELVHVTSEGAGLQLGKVTVLGVATAPQQVLSNGRPVSNFTYSPDTKVLDICVALLMGEQFLVSWC

SEQ ID NO: 697 - DNA, 2832 bp, synthetic construct
  misc_feature 1..2832: note = Variant of the Homo Sapiens Lysosomal alpha-glucosidase
  source 1..2832: mol_type = other DNA
atggaatggagctgggtctttctcttcttcctgtcagtaacgactggtgtccactccggacacattctgtggcatgatttttctaccgtgcctagagagctttccggttcaagtcaagtcctcgaagaaacacatccagcccatcaggttggcgcatctaggccgggccctcgggacgctcaactccacccagggagacctagggccgttcccactcagtgcgacgtgccagagaactcacgcttcgattgtgcacctgagaaggctatcacgcaagagcagtgcgaggcccgcggatgttgttacataccggctaaacaggggctgcagggtgcgcagatgggccaaccttggtgcttcttcccaccatcctatccgagttacaagctggagaatctctcccagtctgaaatgggatataccgcaacactgactcggaccaccccctccttctttcccaaagatatcttgactctgagacttgacgtaatgatggagacagaaaacaggctccactttaccattaaggaccctgccaatcgccgatacgaggtgcctctggaaacaccacacgtgcacagtagagctccatcacctctgtattctgtcgagttctccgaagagccgtttggcgttatcgtcaggaggcagctcgacgggcgagtgcttctgaacacgactgtggccccgttgttctttgcggatcagtttctgcaactgtcaacaagtctcccttctcagtacattaccgggcttgcagagcatctgtccccactcatgctgagtacttcatggaacaaaatcacactgtggaatagagaccttgctcctactccaggagccaacttgtatggttctcaccctttctacttggccctggaagatggcggatcagcgcatggcgtattcctcctgaattccaacgcaatggacgttgttcttcagccatctcctgctttgagttggagatctacaggcgggatactggacgtctacatctttctgggtccagagcctaaatccgtagtgcagcagtatcttgatgtcgtcggatacccgtttatgccaccatattggggcctggggttccacttgtgccgctggggatattcatccaccgccattacacgacaagttgttgagaatatgaccagggcacattttcctctggatgtacagtggaacgacctggactacatggatagtcgccgcgacttcaccttcaataaggatgggttcagagactttcctgctatggtccaagaacttcaccagggaggcaggaggtacatgatgatcgtagatccgggaatttcttcttctggcccagccggttcatacagaccgtatgacgaaggactgcgacgaggcgtctttatcacgaacgagactggtcagcctttgataggcaaggtttggccagggtccaccgctttcccggatttcacaaatcctgaggcactggcctggtgggaagatatggtcgccgagtttcacgaccaggtcccatttgacgggatgtggatcgacatgaacgagccatccaacttcattagaggaagtgtggatggctgtccgaataatgagctggaaaaccctccttacgtaccaggcgttgttggtgggactcttcaagctgcgacgatttgcgcatcctcccatcagttcctgtcaacccactataacttgcacaatctgtacgggacaacagaggctatcgccagtcatagggccctggtaaaagctagaggaacacgccctttcgttatctctcgctcaacttttgcaggccacggtaggtatgccggacattggaccggcgacgtctggagttcttgggaacagctggcttcctccgttccagagatattgcagtttaacctgttgggagtcccacttgtaggtgcagatgtttgtggcttcctggggaacacctcagaagaattgtgcgtaagatggactcaactgggcgccttctacccttttatgcgcaatcacaactcactgacatctttgcctcaagaaccgtactcatttagtgagccagcacagcaggccatgaggaaggctcttatactgagatatgcacttctgccgcatctgtacacccttttccaccaggctcatgtccatggagagactgttgcacgacctctgttcttggagttcccaaaagactcttccacgtggacagtcgatcaccagatgctgtggggcgaggctctgctgattacacctgtattgcaacctggtaaggccgaagttaccgggtactttccattggggacctggtatgatctgcaaacagtcccggttgaagctcttggaagtcttccacctccacctgctgcaccaagggagcctgcgatccactctgaaggacagtgggtaactttgcctgcaccgctggacaccatcaatgtccatctgcgcgaaggctacatcataccacttcaaggtcctggactgaccactacagagtctagaaaacaaccaatggctcttgctgttgcactgactaaaagcggcgaagcaaggggtgagctgttctgggacgacggagagtcactggaggtactcgaacgaggcgcgtatacgcaggtcatttttgaggctcgcaataatacgatcgttaacgagctggtccacgtcacttcagaaggtgcaggccttcagttgggcaaggtaactgtcctgggagttgctacagcaccgcagcaggtcttgtccaacggacggcccgtaagcaactttacctatagtcctgataccaaagttctggacatctgcgttgctctgctgatgggtgagcagttcctggtatcatggtgc

SEQ ID NO: 698 - protein, 944 aa, synthetic construct
  REGION 1..944: note = Variant of the Homo Sapiens Lysosomal alpha-glucosidase
MEWSWVFLFFLSVTTGVHSGHILWHDFSTVPRELSGSSQVLEETHPAHQVGASRPGPRDAQLHPGRPRAVPTQCDVPENSRFDCAPEKAITQEQCEARGCCYIPAKQGLQGAQMGQPWCFFPPSYPSYKLENLSQSEMGYTATLTRTTPSFFPKDILTLRLDVMMETENRLHFTIKDPANRRYEVPLETPHVHSRAPSPLYSVEFSEEPFGVIVRRQLDGRVLLNTTVAPLFFADQFLQLSTSLPSQYITGLAEHLSPLMLSTSWNKITLWNRDLAPTPGANLYGSHPFYLALEDGGSAHGVFLLNSNAMDVVLQPSPALSWRSTGGILDVYIFLGPEPKSVVQQYLDVVGYPFMPPYWGLGFHLCRWGYSSTAITRQVVENMTRAHFPLDVQWNDLDYMDSRRDFTFNKDGFRDFPAMVQELHQGGRRYMMIVDPGISSSGPAGSYRPYDEGLRRGVFITNETGQPLIGKVWPGSTAFPDFTNPEALAWWEDMVAEFHDQVPFDGMWIDMNEPSNFIRGSVDGCPNNELENPPYVPGVVGGTLQAATICASSHQFLSTHYNLHNLYGTTEAIASHRALVKARGTRPFVISRSTFAGHGRYAGHWTGDVWSSWEQLASSVPEILQFNLLGVPLVGADVCGFLGNTSEELCVRWTQLGAFYPFMRNHNSLTSLPQEPYSFSEPAQQAMRKALILRYALLPHLYTLFHQAHVHGETVARPLFLEFPKDSSTWTVDHQMLWGEALLITPVLQPGKAEVTGYFPLGTWYDLQTVPVEALGSLPPPPAAPREPAIHSEGQWVTLPAPLDTINVHLREGYIIPLQGPGLTTTESRKQPMALAVALTKSGEARGELFWDDGESLEVLERGAYTQVIFEARNNTIVNELVHVTSEGAGLQLGKVTVLGVATAPQQVLSNGRPVSNFTYSPDTKVLDICVALLMGEQFLVSWC

SEQ ID NO: 699 - DNA, 2832 bp, synthetic construct
  misc_feature 1..2832: note = Variant of the Homo Sapiens Lysosomal alpha-glucosidase
  source 1..2832: mol_type = other DNA
atggaatggagctgggtctttctcttcttcctgtcagtaacgactggtgtccactccggacacattctgtggcatgatttttcttttgtgcctagagagctttccggttcaagtcaagtcctcgaagaaacacatccagcccatcaggttggcgcatctaggccgggccctcgggacgctcaactccacccagggagacctagggccgttcccactcagtgcgacgtgccagagaactcacgcttcgattgtgcacctgagaaggctatcacgcaagagcagtgcgaggcccgcggatgttgttacataccggctaaacaggggctgcagggtgcgcagatgggccaaccttggtgcttcttcccaccatcctatccgagttacaagctggagaatctctcccagtctgaaatgggatataccgcaacactgactcggaccaccccctccttctttcccaaagatatcttgactctgagacttgacgtaatgatggagacagaaaacaggctccactttaccattaaggaccctgccaatcgccgatacgaggtgcctctggaaacaccacacgtgcacagtagagctccatcacctctgtattctgtcgagttctccgaagagccgtttggcgttatcgtcaggaggcagctcgacgggcgagtgcttctgaacacgactgtggccccgttgttctttgcggatcagtttctgcaactgtcaacaagtctcccttctcagtacattaccgggcttgcagagcatctgtccccactcatgctgagtacttcatggaacaaaatcacactgtggaatagagaccttgctcctactccaggagccaacttgtatggttctcaccctttctacttggccctggaagatggcggatcagcgcatggcgtattcctcctgaattccaacgcaatggacgttgttcttcagccatctcctgctttgagttggagatctacaggcgggatactggacgtctacatctttctgggtccagagcctaaatccgtagtgcagcagtatcttgatgtcgtcggatacccgtttatgccaccatattggggcctggggttccacttgtgccgctggggatattcatccaccgccattacacgacaagttgttgagaatatgaccagggcacattttcctctggatgtacagtggaacgacctggactacatggatagtcgccgcgacttcaccttcaataaggatgggttcagagactttcctgctatggtccaagaacttcaccagggaggcaggaggtacatgatgatcgtagatccgggaatttcttcttctggcccagccggttcatacagaccgtatgacgaaggactgcgacgaggcgtctttatcacgaacgagactggtcagcctttgataggcaaggtttggccagggtccaccgctttcccggatttcacaaatcctgaggcactggcctggtgggaagatatggtcgccgagtttcacgaccaggtcccatttgacgggatgtggatcgacatgaacgagccatccaacttcattagaggaagtgtggatggctgtccgaataatgagctggaaaaccctccttacgtaccaggcgttgttggtgggactcttcaagctgcgacgatttgcgcatcctcccatcagttcctgtcaacccactataacttgcacaatctgtacgggacaacagaggctatcgccagtcatagggccctggtaaaagctagaggaacacgccctttcgttatctctcgctcaacttttgcaggccacggtaggtatgccggacattggaccggcgacgtctggagttcttgggaacagctggcttcctccgttccagagatattgcagtttaacctgttgggagtcccacttgtaggtgcagatgtttgtggcttcctggggaacacctcagaagaattgtgcgtaagatggactcaactgggcgccttctacccttttatgcgcaatcacaactcactgacatctttgcctcaagaaccgtactcatttagtgagccagcacagcaggccatgaggaaggctcttggcctgagatatgcacttctgccgcatctgtacacccttttccaccaggctcatgtccatggagagactgttgcacgacctctgttcttggagttcccaaaagactcttccacgtggacagtcgatcaccagatgctgtggggcgaggctctgctgattacacctgtattgcaacctggtaaggccgaagttaccgggtactttccattggggacctggtatgatctgcaaacagtcccggttgaagctcttggaagtcttccacctccacctgctgcaccaagggagcctgcgatccactctgaaggacagtgggtaactttgcctgcaccgctggacaccatcaatgtccatctgcgcgaaggctacatcataccacttcaaggtcctggactgaccactacagagtctagaaaacaaccaatggctcttgctgttgcactgactaaaagcggcgaagcaaggggtgagctgttctgggacgacggagagtcactggaggtactcgaacgaggcgcgtatacgcaggtcatttttgaggctcgcaataatacgatcgttaacgagctggtccacgtcacttcagaaggtgcaggccttcagttgggcaaggtaactgtcctgggagttgctacagcaccgcagcaggtcttgtccaacggacggcccgtaagcaactttacctatagtcctgataccaaagttctggacatctgcgttgctctgctgatgggtgagcagttcctggtatcatggtgc

SEQ ID NO: 700 - protein, 944 aa, synthetic construct
  REGION 1..944: note = Variant of the Homo Sapiens Lysosomal alpha-glucosidase
MEWSWVFLFFLSVTTGVHSGHILWHDFSFVPRELSGSSQVLEETHPAHQVGASRPGPRDAQLHPGRPRAVPTQCDVPENSRFDCAPEKAITQEQCEARGCCYIPAKQGLQGAQMGQPWCFFPPSYPSYKLENLSQSEMGYTATLTRTTPSFFPKDILTLRLDVMMETENRLHFTIKDPANRRYEVPLETPHVHSRAPSPLYSVEFSEEPFGVIVRRQLDGRVLLNTTVAPLFFADQFLQLSTSLPSQYITGLAEHLSPLMLSTSWNKITLWNRDLAPTPGANLYGSHPFYLALEDGGSAHGVFLLNSNAMDVVLQPSPALSWRSTGGILDVYIFLGPEPKSVVQQYLDVVGYPFMPPYWGLGFHLCRWGYSSTAITRQVVENMTRAHFPLDVQWNDLDYMDSRRDFTFNKDGFRDFPAMVQELHQGGRRYMMIVDPGISSSGPAGSYRPYDEGLRRGVFITNETGQPLIGKVWPGSTAFPDFTNPEALAWWEDMVAEFHDQVPFDGMWIDMNEPSNFIRGSVDGCPNNELENPPYVPGVVGGTLQAATICASSHQFLSTHYNLHNLYGTTEAIASHRALVKARGTRPFVISRSTFAGHGRYAGHWTGDVWSSWEQLASSVPEILQFNLLGVPLVGADVCGFLGNTSEELCVRWTQLGAFYPFMRNHNSLTSLPQEPYSFSEPAQQAMRKALGLRYALLPHLYTLFHQAHVHGETVARPLFLEFPKDSSTWTVDHQMLWGEALLITPVLQPGKAEVTGYFPLGTWYDLQTVPVEALGSLPPPPAAPREPAIHSEGQWVTLPAPLDTINVHLREGYIIPLQGPGLTTTESRKQPMALAVALTKSGEARGELFWDDGESLEVLERGAYTQVIFEARNNTIVNELVHVTSEGAGLQLGKVTVLGVATAPQQVLSNGRPVSNFTYSPDTKVLDICVALLMGEQFLVSWC

SEQ ID NO: 701 - DNA, 2832 bp, synthetic construct
  misc_feature 1..2832: note = Variant of the Homo Sapiens Lysosomal alpha-glucosidase
  source 1..2832: mol_type = other DNA
atggaatggagctgggtctttctcttcttcctgtcagtaacgactggtgtccactccggacacattctgtggcatgatttttctaccgtgcctagagagctttccggttcaagtcaagtcctcgaagaaacacatccagcccatcaggttggcgcatctaggccgggccctcgggacgctcaactccacccagggagacctagggccgttcccactcagtgcgacgtgccagagaactcacgcttcgattgtgcacctgagaaggctatcacgcaagagcagtgcgaggcccgcggatgttgttacataccggctaaacaggggctgcagggtgcgcagatgggccaaccttggtgcttcttcccaccatcctatccgagttacaagctggagaatctctcccagtctgaaatgggatataccgcaacactgactcggaccaccccctccttctttcccaaagatatcttgactctgagacttgacgtaatgatggagacagaaaacaggctccactttaccattaaggaccctgccaatcgccgatacgaggtgcctctggaaacaccacacgtgcacagtagagctccatcacctctgtattctgtcgagttctccgaagagccgtttggcgttatcgtcaggaggcagctcgacgggcgagtgcttctgaacacgactgtggccccgttgttctttgcggatcagtttctgcaactgtcaacaagtctcccttctcagtacattaccgggcttgcagagcatctgtccccactcatgctgagtacttcatggaacaaaatcacactgtggaatagagaccttgctcctactccaggagccaacttgtatggttctcaccctttctacttggccctggaagatggcggatcagcgcatggcgtattcctcctgaattccaacgcaatggacgttgttcttcagccatctcctgctttgagttggagatctacaggcgggatactggacgtctacatctttctgggtccagagcctaaatccgtagtgcagcagtatcttgatgtcgtcggatacccgtttatgccaccatattggggcctggggttccacttgtgccgctggggatattcatccaccgccattacacgacaagttgttgagaatatgaccagggcacattttcctctggatgtacagtggaacgacctggactacatggatagtcgccgcgacttcaccttcaataaggatgggttcagagactttcctgctatggtccaagaacttcaccagggaggcaggaggtacatgatgatcgtagatccgggaatttcttcttctggcccagccggttcatacagaccgtatgacgaaggactgcgacgaggcgtctttatcacgaacgagactggtcagcctttgataggcaaggtttggccagggtccaccgctttcccggatttcacaaatcctgaggcactggcctggtgggaagatatggtcgccgagtttcacgaccaggtcccatttgacgggatgtggatcgacatgaacgagccatccaacttcattagaggaagtatggatggctgtccgaataatgagctggaaaaccctccttacgtaccaggcgttgttggtgggactcttcaagctgcgacgatttgcgcatcctcccatcagttcctgtcaacccactataacttgcacaatctgtacgggacaacagaggctatcgccagtcatagggccctggtaaaagctagaggaacacgccctttcgttatctctcgctcaacttttgcaggccacggtaggtatgccggacattggaccggcgacgtctggagttcttgggaacagctggcttcctccgttccagagatattgcagtttaacctgttgggagtcccacttgtaggtgcagatgtttgtggcttcctggggaacacctcagaagaattgtgcgtaagatggactcaactgggcgccttctacccttttatgcgcaatcacaactcactgacatctttgcctcaagaaccgtactcatttagtgagccagcacagcaggccatgaggaaggctcttggcctgagatatgcacttctgccgcatctgtacacccttttccaccaggctcatgtccatggagagactgttgcacgacctctgttcttggagttcccaaaagactcttccacgtggacagtcgatcaccagatgctgtggggcgaggctctgctgattacacctgtattgcaacctggtaaggccgaagttaccgggtactttccattggggacctggtatgatctgcaaacagtcccggttgaagctcttggaagtcttccacctccacctgctgcaccaagggagcctgcgatccactctgaaggacagtgggtaactttgcctgcaccgctggacaccatcaatgtccatctgcgcgaaggctacatcataccacttcaaggtcctggactgaccactacagagtctagaaaacaaccaatggctcttgctgttgcactgactaaaagcggcgaagcaaggggtgagctgttctgggacgacggagagtcactggaggtactcgaacgaggcgcgtatacgcaggtcatttttgaggctcgcaataatacgatcgttaacgagctggtccacgtcacttcagaaggtgcaggccttcagttgggcaaggtaactgtcctgggagttgctacagcaccgcagcaggtcttgtccaacggacggcccgtaagcaactttacctatagtcctgataccaaagttctggacatctgcgttgctctgctgatgggtgagcagttcctggtatcatggtgc

SEQ ID NO: 702 - protein, 944 aa, synthetic construct
  REGION 1..944: note = Variant of the Homo Sapiens Lysosomal alpha-glucosidase
MEWSWVFLFFLSVTTGVHSGHILWHDFSTVPRELSGSSQVLEETHPAHQVGASRPGPRDAQLHPGRPRAVPTQCDVPENSRFDCAPEKAITQEQCEARGCCYIPAKQGLQGAQMGQPWCFFPPSYPSYKLENLSQSEMGYTATLTRTTPSFFPKDILTLRLDVMMETENRLHFTIKDPANRRYEVPLETPHVHSRAPSPLYSVEFSEEPFGVIVRRQLDGRVLLNTTVAPLFFADQFLQLSTSLPSQYITGLAEHLSPLMLSTSWNKITLWNRDLAPTPGANLYGSHPFYLALEDGGSAHGVFLLNSNAMDVVLQPSPALSWRSTGGILDVYIFLGPEPKSVVQQYLDVVGYPFMPPYWGLGFHLCRWGYSSTAITRQVVENMTRAHFPLDVQWNDLDYMDSRRDFTFNKDGFRDFPAMVQELHQGGRRYMMIVDPGISSSGPAGSYRPYDEGLRRGVFITNETGQPLIGKVWPGSTAFPDFTNPEALAWWEDMVAEFHDQVPFDGMWIDMNEPSNFIRGSMDGCPNNELENPPYVPGVVGGTLQAATICASSHQFLSTHYNLHNLYGTTEAIASHRALVKARGTRPFVISRSTFAGHGRYAGHWTGDVWSSWEQLASSVPEILQFNLLGVPLVGADVCGFLGNTSEELCVRWTQLGAFYPFMRNHNSLTSLPQEPYSFSEPAQQAMRKALGLRYALLPHLYTLFHQAHVHGETVARPLFLEFPKDSSTWTVDHQMLWGEALLITPVLQPGKAEVTGYFPLGTWYDLQTVPVEALGSLPPPPAAPREPAIHSEGQWVTLPAPLDTINVHLREGYIIPLQGPGLTTTESRKQPMALAVALTKSGEARGELFWDDGESLEVLERGAYTQVIFEARNNTIVNELVHVTSEGAGLQLGKVTVLGVATAPQQVLSNGRPVSNFTYSPDTKVLDICVALLMGEQFLVSWC

SEQ ID NO: 703 - DNA, 2832 bp, synthetic construct
  misc_feature 1..2832: note = Variant of the Homo Sapiens Lysosomal alpha-glucosidase
  source 1..2832: mol_type = other DNA
atggaatggagctgggtctttctcttcttcctgtcagtaacgactggtgtccactccggacacattctgtggcatgatttttctaccgtgcctagagagctttccggttcaagtcaagtcctcgaagaaacacatccagcccatcaggttggcgcatctaggccgggccctcgggacgctcaactccacccagggagacctagggccgttcccactcagtgcgacgtgccagagaactcacgcttcgattgtgcacctgagaaggctatcacgcaagagcagtgcgaggcccgcggatgttgttacataccggctaaacaggggctgcagggtgcgcagatgggccaaccttggtgcttcttcccaccatcctatccgagttacaagctggagaatctctcccagtctgaaatgggatataccgcaacactgactcggaccaccccctccttctttcccaaagatatcttgactctgagacttgacgtaatgatggagacagaaaacaggctccactttaccattaaggaccctgccaatcgccgatacgaggtgcctctggaaacaccacacgtgcacagtagagctccatcacctctgtattctgtcgagttctccgaagagccgtttggcgttatcgtcaggaggcagctcgacgggcgagtgcttctgaacacgactgtggccccgttgttctttgcggatcagtttctgcaactgtcaacaagtctcccttctcagtacattaccgggcttgcagagcatctgtccccactcatgctgagtacttcatggaacaaaatcacactgtggaatagagaccttgctcctactccaggagccaacttgtatggttctcaccctttctacttggccctggaagatggcggatcagcgcatggcgtattcctcctgaattccaacgcaatggacgttgttcttcagccatctcctgctttgagttggagatctacaggcgggatactggacgtctacatctttctgggtccagagcctaaatccgtagtgcagcagtatcttgatgtcgtcggatacccgtttatgccaccatattggggcctggggttccacttgtgccgctggggatattcatccaccgccattacacgacaagttgttgagaatatgaccagggcacattttcctctggatgtacagtggaacgacctggactacatggatagtcgccgcgacttcaccttcaataaggatgggttcagagactttcctgctatggtccaagaacttcaccagggaggcaggaggtacatgatgatcgtagatccgggaatttcttcttctggcccagccggttcatacagaccgtatgacgaaggactgcgacgaggcgtctttatcacgaacgagactggtcagcctttgataggcaaggtttggccagggtccaccgctttcccggatttcacaaatcctgaggcactggcctggtgggaagatatggtcgccgagtttcacgaccaggtcccatttgacgggatgtggatcgacatgaacgagccatccaacttcattagaggaagtgtggatggctgtccgaataatgagctggaaaaccctccttacgtaccaggcgttgttggtgggactcttcaagctgcgacgatttgcgcatcctcccatcagttcctgtcaacccactataacttgcacaatctgtacgggacaacagaggctatcgccagtcatagggccctggtaaaagctagaggaacacgccctttcgttatctctcgctcaacttttgcaggccacggtaggtatgccggacattggaccggcgacgtctggagttcttgggaacagctggcttcctccgttccagagatattgcagtttaacctgttgggagtcccacttgtaggtgcagatgtttgtggcttcctggggaacacctcagaagaattgtgcgtaagatggactcaactgggcgccttctacccttttatgcgcaatcacaactcactgaactctttgcctcaagaaccgtactcatttagtgagccagcacagcaggccatgaggaaggctcttggcctgagatatgcacttctgccgcatctgtacacccttttccaccaggctcatgtccatggagagactgttgcacgacctctgttcttggagttcccaaaagactcttccacgtggacagtcgatcaccagatgctgtggggcgaggctctgctgattacacctgtattgcaacctggtaaggccgaagttaccgggtactttccattggggacctggtatgatctgcaaacagtcccggttgaagctcttggaagtcttccacctccacctgctgcaccaagggagcctgcgatccactctgaaggacagtgggtaactttgcctgcaccgctggacaccatcaatgtccatctgcgcgaaggctacatcataccacttcaaggtcctggactgaccactacagagtctagaaaacaaccaatggctcttgctgttgcactgactaaaagcggcgaagcaaggggtgagctgttctgggacgacggagagtcactggaggtactcgaacgaggcgcgtatacgcaggtcatttttgaggctcgcaataatacgatcgttaacgagctggtccacgtcacttcagaaggtgcaggccttcagttgggcaaggtaactgtcctgggagttgctacagcaccgcagcaggtcttgtccaacggacggcccgtaagcaactttacctatagtcctgataccaaagttctggacatctgcgttgctctgctgatgggtgagcagttcctggtatcatggtgc

SEQ ID NO: 704 - protein, 944 aa, synthetic construct
  REGION 1..944: note = Variant of the Homo Sapiens Lysosomal alpha-glucosidase
MEWSWVFLFFLSVTTGVHSGHILWHDFSTVPRELSGSSQVLEETHPAHQVGASRPGPRDAQLHPGRPRAVPTQCDVPENSRFDCAPEKAITQEQCEARGCCYIPAKQGLQGAQMGQPWCFFPPSYPSYKLENLSQSEMGYTATLTRTTPSFFPKDILTLRLDVMMETENRLHFTIKDPANRRYEVPLETPHVHSRAPSPLYSVEFSEEPFGVIVRRQLDGRVLLNTTVAPLFFADQFLQLSTSLPSQYITGLAEHLSPLMLSTSWNKITLWNRDLAPTPGANLYGSHPFYLALEDGGSAHGVFLLNSNAMDVVLQPSPALSWRSTGGILDVYIFLGPEPKSVVQQYLDVVGYPFMPPYWGLGFHLCRWGYSSTAITRQVVENMTRAHFPLDVQWNDLDYMDSRRDFTFNKDGFRDFPAMVQELHQGGRRYMMIVDPGISSSGPAGSYRPYDEGLRRGVFITNETGQPLIGKVWPGSTAFPDFTNPEALAWWEDMVAEFHDQVPFDGMWIDMNEPSNFIRGSVDGCPNNELENPPYVPGVVGGTLQAATICASSHQFLSTHYNLHNLYGTTEAIASHRALVKARGTRPFVISRSTFAGHGRYAGHWTGDVWSSWEQLASSVPEILQFNLLGVPLVGADVCGFLGNTSEELCVRWTQLGAFYPFMRNHNSLNSLPQEPYSFSEPAQQAMRKALGLRYALLPHLYTLFHQAHVHGETVARPLFLEFPKDSSTWTVDHQMLWGEALLITPVLQPGKAEVTGYFPLGTWYDLQTVPVEALGSLPPPPAAPREPAIHSEGQWVTLPAPLDTINVHLREGYIIPLQGPGLTTTESRKQPMALAVALTKSGEARGELFWDDGESLEVLERGAYTQVIFEARNNTIVNELVHVTSEGAGLQLGKVTVLGVATAPQQVLSNGRPVSNFTYSPDTKVLDICVALLMGEQFLVSWC

SEQ ID NO: 705 - DNA, 2832 bp, synthetic construct
  misc_feature 1..2832: note = Variant of the Homo Sapiens Lysosomal alpha-glucosidase
  source 1..2832: mol_type = other DNA
atggaatggagctgggtctttctcttcttcctgtcagtaacgactggtgtccactccggacacattctgtggcatgatttttctatggtgcctagagagctttccggttcaagtcaagtcctcgaagaaacacatccagcccatcaggttggcgcatctaggccgggccctcgggacgctcaactccacccagggagacctagggccgttcccactcagtgcgacgtgccagagaactcacgcttcgattgtgcacctgagaaggctatcacgcaagagcagtgcgaggcccgcggatgttgttacataccggctaaacaggggctgcagggtgcgcagatgggccaaccttggtgcttcttcccaccatcctatccgagttacaagctggagaatctctcccagtctgaaatgggatataccgcaacactgactcggaccaccccctccttctttcccaaagatatcttgactctgagacttgacgtaatgatggagacagaaaacaggctccactttaccattaaggaccctgccaatcgccgatacgaggtgcctctggaaacaccacacgtgcacagtagagctccatcacctctgtattctgtcgagttctccgaagagccgtttggcgttatcgtcaggaggcagctcgacgggcgagtgcttctgaacacgactgtggccccgttgttctttgcggatcagtttctgcaactgtcaacaagtctcccttctcagtacattaccgggcttgcagagcatctgtccccactcatgctgagtacttcatggaacaaaatcacactgtggaatagagaccttgctcctactccaggagccaacttgtatggttctcaccctttctacttggccctggaagatggcggatcagcgcatggcgtattcctcctgaattccaacgcaatggacgttgttcttcagccatctcctgctttgagttggagatctacaggcgggatactggacgtctacatctttctgggtccagagcctaaatccgtagtgcagcagtatcttgatgtcgtcggatacccgtttatgccaccatattggggcctggggttccacttgtgccgctggggatattcatccaccgccattacacgacaagttgttgagaatatgaccagggcacattttcctctggatgtacagtggaacgacctggactacatggatagtcgccgcgacttcaccttcaataaggatgggttcagagactttcctgctatggtccaagaacttcaccagggaggcaggaggtacatgatgatcgtagatccgggaatttcttcttctggcccagccggttcatacagaccgtatgacgaaggactgcgacgaggcgtctttatcacgaacgagactggtcagcctttgataggcaaggtttggccagggtccaccgctttcccggatttcacaaatcctgaggcactggcctggtgggaagatatggtcgccgagtttcacgaccaggtcccatttgacgggatgtggatcgacatgaacgagccatccaacttcattagaggaagtgtggatggctgtccgaataatgagctggaaaaccctccttacgtaccaggcgttgttggtgggactcttcaagctgcgacgatttgcgcatcctcccatcagttcctgtcaacccactataacttgcacaatctgtacgggacaacagaggctatcgccagtcatagggccctggtaaaagctagaggaacacgccctttcgttatctctcgctcaacttttgcaggccacggtaggtatgccggacattggaccggcgacgtctggagttcttgggaacagctggcttcctccgttccagagatattgcagtttaacctgttgggagtcccacttgtaggtgcagatgtttgtggcttcctggggaacacctcagaagaattgtgcgtaagatggactcaactgggcgccttctacccttttatgcgcaatcacaactcactgacatctttgcctcaagaaccgtactcatttagtgagccagcacagcaggccatgaggaaggctcttggcctgagatatgcacttctgccgcatctgtacacccttttccaccaggctcatgtccatggagagactgttgcacgacctctgttcttggagttcccaaaagactcttccacgtggacagtcgatcaccagatgctgtggggcgaggctctgctgattacacctgtattgcaacctggtaaggccgaagttaccgggtactttccattggggacctggtatgatctgcaaacagtcccggttgaagctcttggaagtcttccacctccacctgctgcaccaagggagcctgcgatccactctgaaggacagtgggtaactttgcctgcaccgctggacaccatcaatgtccatctgcgcgaaggctacatcataccacttcaaggtcctggactgaccactacagagtctagaaaacaaccaatggctcttgctgttgcactgactaaaagcggcgaagcaaggggtgagctgttctgggacgacggagagtcactggaggtactcgaacgaggcgcgtatacgcaggtcatttttgaggctcgcaataatacgatcgttaacgagctggtccacgtcacttcagaaggtgcaggccttcagttgggcaaggtaactgtcctgggagttgctacagcaccgcagcaggtcttgtccaacggacggcccgtaagcaactttacctatagtcctgataccaaagttctggacatctgcgttgctctgctgatgggtgagcagttcctggtatcatggtgc

SEQ ID NO: 706 - protein, 944 aa, synthetic construct
  REGION 1..944: note = Variant of the Homo Sapiens Lysosomal alpha-glucosidase
MEWSWVFLFFLSVTTGVHSGHILWHDFSMVPRELSGSSQVLEETHPAHQVGASRPGPRDAQLHPGRPRAVPTQCDVPENSRFDCAPEKAITQEQCEARGCCYIPAKQGLQGAQMGQPWCFFPPSYPSYKLENLSQSEMGYTATLTRTTPSFFPKDILTLRLDVMMETENRLHFTIKDPANRRYEVPLETPHVHSRAPSPLYSVEFSEEPFGVIVRRQLDGRVLLNTTVAPLFFADQFLQLSTSLPSQYITGLAEHLSPLMLSTSWNKITLWNRDLAPTPGANLYGSHPFYLALEDGGSAHGVFLLNSNAMDVVLQPSPALSWRSTGGILDVYIFLGPEPKSVVQQYLDVVGYPFMPPYWGLGFHLCRWGYSSTAITRQVVENMTRAHFPLDVQWNDLDYMDSRRDFTFNKDGFRDFPAMVQELHQGGRRYMMIVDPGISSSGPAGSYRPYDEGLRRGVFITNETGQPLIGKVWPGSTAFPDFTNPEALAWWEDMVAEFHDQVPFDGMWIDMNEPSNFIRGSVDGCPNNELENPPYVPGVVGGTLQAATICASSHQFLSTHYNLHNLYGTTEAIASHRALVKARGTRPFVISRSTFAGHGRYAGHWTGDVWSSWEQLASSVPEILQFNLLGVPLVGADVCGFLGNTSEELCVRWTQLGAFYPFMRNHNSLTSLPQEPYSFSEPAQQAMRKALGLRYALLPHLYTLFHQAHVHGETVARPLFLEFPKDSSTWTVDHQMLWGEALLITPVLQPGKAEVTGYFPLGTWYDLQTVPVEALGSLPPPPAAPREPAIHSEGQWVTLPAPLDTINVHLREGYIIPLQGPGLTTTESRKQPMALAVALTKSGEARGELFWDDGESLEVLERGAYTQVIFEARNNTIVNELVHVTSEGAGLQLGKVTVLGVATAPQQVLSNGRPVSNFTYSPDTKVLDICVALLMGEQFLVSWC

SEQ ID NO: 707 - DNA, 2832 bp, synthetic construct
  misc_feature 1..2832: note = Variant of the Homo Sapiens Lysosomal alpha-glucosidase
  source 1..2832: mol_type = other DNA
atggaatggagctgggtctttctcttcttcctgtcagtaacgactggtgtccactccggacacattctgtggcatgatttttctaccgtgcctagagagctttccggttcaagtcaagtcctcgaagaaacacatccagcccatcaggttggcgcatctaggccgggccctcgggacgctcaactccacccagggagacctagggccgttcccactcagtgcgacgtgccagagaactcacgcttcgattgtgcacctgagaaggctatcacgcaagagcagtgcgaggcccgcggatgttgttacataccggctaaacaggggctgcagggtgcgcagatgggccaaccttggtgcttcttcccaccatcctatccgagttacaagctggagaatctctcccagtctgaaatgggatataccgcaacactgactcggaccaccccctccttctttcccaaagatatcttgactctgagacttgacgtaatgatggagacagaaaacaggctccactttaccattaaggaccctgccaatcgccgatacgaggtgcctctggaaacaccacacgtgcacagtagagctccatcacctctgtattctgtcgagttctccgaagagccgtttggcgttatcgtcaggaggcagctcgacgggcgagtgcttctgaacacgactgtggccccgttgttctttgcggatcagtttctgcaactgtcaacaagtctcccttctcagtacattaccgggcttgcagagcatctgtccccactcatgctgagtacttcatggaacaaaatcacactgtggaatagagaccttgctcctactccaggagccaacttgtatggttctcaccctttctacttggccctggaagatggcggatcagcgcatggcgtattcctcctgaattccaacgcaatggacgttgttcttcagccatctcctgctttgagttggagatctacaggcgggatactggacgtctacatctttctgggtccagagcctaaatccgtagtgcagcagtatcttgatgtcgtcggatacccgtttatgccaccatattggggcctggggttccacttgtgccgctggggatattcatccaccgccattacacgacaagttgttgagaatatgaccagggcacattttcctctggatgtacagtggaacgacctggactacatggatagtcgccgcgacttcaccttcaataaggatgggttcagagactttcctgctatggtccaagaacttcaccagggaggcaggaggtacatgatgatcgtagatccgggaatttcttcttctggcccagccggttcatacagaccgtatgacgaaggactgcgacgaggcgtctttatcacgaacgagactggtcagcctttgataggcaaggtttggccagggtccaccgctttcccggatttcacaaatcctggggcactggcctggtgggaagatatggtcgccgagtttcacgaccaggtcccatttgacgggatgtggatcgacatgaacgagccatccaacttcattagaggaagtgtggatggctgtccgaataatgagctggaaaaccctccttacgtaccaggcgttgttggtgggactcttcaagctgcgacgatttgcgcatcctcccatcagttcctgtcaacccactataacttgcacaatctgtacgggacaacagaggctatcgccagtcatagggccctggtaaaagctagaggaacacgccctttcgttatctctcgctcaacttttgcaggccacggtaggtatgccggacattggaccggcgacgtctggagttcttgggaacagctggcttcctccgttccagagatattgcagtttaacctgttgggagtcccacttgtaggtgcagatgtttgtggcttcctggggaacacctcagaagaattgtgcgtaagatggactcaactgggcgccttctacccttttatgcgcaatcacaactcactgacatctttgcctcaagaaccgtactcatttagtgagccagcacagcaggccatgaggaaggctcttggcctgagatatgcacttctgccgcatctgtacacccttttccaccaggctcatgtccatggagagactgttgcacgacctctgttcttggagttcccaaaagactcttccacgtggacagtcgatcaccagatgctgtggggcgaggctctgctgattacacctgtattgcaacctggtaaggccgaagttaccgggtactttccattggggacctggtatgatctgcaaacagtcccggttgaagctcttggaagtcttccacctccacctgctgcaccaagggagcctgcgatccactctgaaggacagtgggtaactttgcctgcaccgctggacaccatcaatgtccatctgcgcgaaggctacatcataccacttcaaggtcctggactgaccactacagagtctagaaaacaaccaatggctcttgctgttgcactgactaaaagcggcgaagcaaggggtgagctgttctgggacgacggagagtcactggaggtactcgaacgaggcgcgtatacgcaggtcatttttgaggctcgcaataatacgatcgttaacgagctggtccacgtcacttcagaaggtgcaggccttcagttgggcaaggtaactgtcctgggagttgctacagcaccgcagcaggtcttgtccaacggacggcccgtaagcaactttacctatagtcctgataccaaagttctggacatctgcgttgctctgctgatgggtgagcagttcctggtatcatggtgc

SEQ ID NO: 708 - protein, 944 aa, synthetic construct
  REGION 1..944: note = Variant of the Homo Sapiens Lysosomal alpha-glucosidase
MEWSWVFLFFLSVTTGVHSGHILWHDFSTVPRELSGSSQVLEETHPAHQVGASRPGPRDAQLHPGRPRAVPTQCDVPENSRFDCAPEKAITQEQCEARGCCYIPAKQGLQGAQMGQPWCFFPPSYPSYKLENLSQSEMGYTATLTRTTPSFFPKDILTLRLDVMMETENRLHFTIKDPANRRYEVPLETPHVHSRAPSPLYSVEFSEEPFGVIVRRQLDGRVLLNTTVAPLFFADQFLQLSTSLPSQYITGLAEHLSPLMLSTSWNKITLWNRDLAPTPGANLYGSHPFYLALEDGGSAHGVFLLNSNAMDVVLQPSPALSWRSTGGILDVYIFLGPEPKSVVQQYLDVVGYPFMPPYWGLGFHLCRWGYSSTAITRQVVENMTRAHFPLDVQWNDLDYMDSRRDFTFNKDGFRDFPAMVQELHQGGRRYMMIVDPGISSSGPAGSYRPYDEGLRRGVFITNETGQPLIGKVWPGSTAFPDFTNPGALAWWEDMVAEFHDQVPFDGMWIDMNEPSNFIRGSVDGCPNNELENPPYVPGVVGGTLQAATICASSHQFLSTHYNLHNLYGTTEAIASHRALVKARGTRPFVISRSTFAGHGRYAGHWTGDVWSSWEQLASSVPEILQFNLLGVPLVGADVCGFLGNTSEELCVRWTQLGAFYPFMRNHNSLTSLPQEPYSFSEPAQQAMRKALGLRYALLPHLYTLFHQAHVHGETVARPLFLEFPKDSSTWTVDHQMLWGEALLITPVLQPGKAEVTGYFPLGTWYDLQTVPVEALGSLPPPPAAPREPAIHSEGQWVTLPAPLDTINVHLREGYIIPLQGPGLTTTESRKQPMALAVALTKSGEARGELFWDDGESLEVLERGAYTQVIFEARNNTIVNELVHVTSEGAGLQLGKVTVLGVATAPQQVLSNGRPVSNFTYSPDTKVLDICVALLMGEQFLVSWC

SEQ ID NO: 709 - DNA, 2832 bp, synthetic construct
  misc_feature 1..2832: note = Variant of the Homo Sapiens Lysosomal alpha-glucosidase
  source 1..2832: mol_type = other DNA
atggaatggagctgggtctttctcttcttcctgtcagtaacgactggtgtccactccggacacattctgtggcatgatttttctaccgtgcctagagagctttccggttcaagtcaagtcctcgaagaaacacatccagcccatcaggttggcgcatctaggccgggccctcgggacgctcaactccacccagggagacctagggccgttcccactcagtgcgacgtgccagagaactcacgcttcgattgtgcacctgagaaggctatcacgcaagagcagtgcgaggcccgcggatgttgttacataccggctaaacaggggctgcagggtgcgcagatgggccaaccttggtgcttcttcccaccatcctatccgagttacaagctggagaatctctcccagtctgaaatgggatataccgcaacactgactcggaccaccccctccttctttcccaaagatatcttgactctgagacttgacgtaatgatggagacagaaaacaggctccactttaccattaaggaccctgccaatcgccgatacgaggtgcctctggaaacaccacacgtgcacagtagagctccatcacctctgtattctgtcgagttctccgaagagccgtttggcgttatcgtcaggaggcagctcgacgggcgagtgcttctgaacacgactgtggccccgttgttctttgcggatcagtttctgcaactgtcaacaagtctcccttctcagtacattaccgggcttgcagagcatctgtccccactcatgctgagtacttcatggaacaaaatcacactgtggaatagagaccttgctcctactccaggagccaacttgtatggttctcaccctttctacttggccctggaagatggcggatcagcgcatggcgtattcctcctgaattccaacgcaatggacgttgttcttcagccatctcctgctttgagttggagatctacaggcgggatactggacgtctacatctttctgggtccagagcctaaatccgtagtgcagcagtatcttgatgtcgtcggatacccgtttatgccaccatattggggcctggggttccacttgtgccgctggggatattcatccaccgccattacacgacaagttgttgagaatatgaccagggcacattttcctctggatgtacagtggaacgacctggactacatggatagtcgccgcgacttcaccttcaataaggatgggttcagagactttcctgctatggtccaagaacttcaccagggaggcaggaggtacatgatgatcgtagatccgggaatttcttcttctggcccagccggttcatacagaccgtatgacgaaggactgcgacgaggcgtctttatcacgaacgagactggtcagcctttgataggcaaggtttggccagggtccaccgctttcccggatttcacaaatcctgaggcactggcctggtgggaagatatggtcgccgagtttcacgaccaggtcccatttgacgggatgtggatcgacatgaacgagccatccaacttcattagaggaagtgtggatggctgtccgaataatgagctggaaaaccctccttacgtaccaggcgttgttggtgggactcttcaagctgcgacgatttgcgcatcctcccatcagttcctgtcaacccactataacttgcacaatctgtacgggacaacagaggctatcgccagtcatagggccctggtaaaagctagaggaacacgccctttcgttatctctcgctcaacttttgcaggccacggtaggtatgccggacattggaccggcgacgtctggagttcttgggaacagctggcttcctccgttccagagatattgcagtttaacctgttgggagtcccacttgtaggtgcagatgtttgtggcttcctggggaacacctcagaagaattgtgcgtaagatggactcaactgggcgccttctacccttttatgcgcaatcacaactcactgacatctttgcctcaagaaccgtactcatttagtgagccagcacagcaggccatgaggaaggctcttggcctgagatatgcacttctgccgcatctgtacacccttttccaccaggctcatgtccatggagagactgttgcacgacctctgttcttggagttcccaaaagactcttccacgtggacagtcgatcaccagatgctgtggggcgaggctctgctgattacacctgtattgcaacctggtaaggccgaagttaccgggtactttccattggggacctggtatgatctgcaaacagtcccggttgaagctcttggaagtcttccacctccacctgctgcaccaagggagcctgcgatccactctgaaggacagtgggtaactttgcctgcaccgctggacaccatcaatgtccatctgcgcgaaggctacatcataccacttcaaggtcctggactgaccactacagagtctagaaaacaaccaatggctcttgctgttgcactgactaaaagcggcgaagcaaggggtgagctgttctgggacgacggagagtcactggaggtactcgaacgaggcgcgtatacgcaggtcatttttgaggctcgcaataatacgatcgttaacgagctggtccacgtcacttcagaaggtgcaggccttcagttgggcaaggtaactgtcctgggagttgctacagcaccgcagcaggtcttgtccaacggacggcccgtaagcaactttacctatagtcctgataccaaagttctggacatctgcgttaagctgctgatgggtgagcagttcctggtatcatggtgc

SEQ ID NO: 710 - protein, 944 aa, synthetic construct
  REGION 1..944: note = Variant of the Homo Sapiens Lysosomal alpha-glucosidase
MEWSWVFLFFLSVTTGVHSGHILWHDFSTVPRELSGSSQVLEETHPAHQVGASRPGPRDAQLHPGRPRAVPTQCDVPENSRFDCAPEKAITQEQCEARGCCYIPAKQGLQGAQMGQPWCFFPPSYPSYKLENLSQSEMGYTATLTRTTPSFFPKDILTLRLDVMMETENRLHFTIKDPANRRYEVPLETPHVHSRAPSPLYSVEFSEEPFGVIVRRQLDGRVLLNTTVAPLFFADQFLQLSTSLPSQYITGLAEHLSPLMLSTSWNKITLWNRDLAPTPGANLYGSHPFYLALEDGGSAHGVFLLNSNAMDVVLQPSPALSWRSTGGILDVYIFLGPEPKSVVQQYLDVVGYPFMPPYWGLGFHLCRWGYSSTAITRQVVENMTRAHFPLDVQWNDLDYMDSRRDFTFNKDGFRDFPAMVQELHQGGRRYMMIVDPGISSSGPAGSYRPYDEGLRRGVFITNETGQPLIGKVWPGSTAFPDFTNPEALAWWEDMVAEFHDQVPFDGMWIDMNEPSNFIRGSVDGCPNNELENPPYVPGVVGGTLQAATICASSHQFLSTHYNLHNLYGTTEAIASHRALVKARGTRPFVISRSTFAGHGRYAGHWTGDVWSSWEQLASSVPEILQFNLLGVPLVGADVCGFLGNTSEELCVRWTQLGAFYPFMRNHNSLTSLPQEPYSFSEPAQQAMRKALGLRYALLPHLYTLFHQAHVHGETVARPLFLEFPKDSSTWTVDHQMLWGEALLITPVLQPGKAEVTGYFPLGTWYDLQTVPVEALGSLPPPPAAPREPAIHSEGQWVTLPAPLDTINVHLREGYIIPLQGPGLTTTESRKQPMALAVALTKSGEARGELFWDDGESLEVLERGAYTQVIFEARNNTIVNELVHVTSEGAGLQLGKVTVLGVATAPQQVLSNGRPVSNFTYSPDTKVLDICVKLLMGEQFLVSWC

SEQ ID NO: 711 - DNA, 2832 bp, synthetic construct
  misc_feature 1..2832: note = Variant of the Homo Sapiens Lysosomal alpha-glucosidase
  source 1..2832: mol_type = other DNA
atggaatggagctgggtctttctcttcttcctgtcagtaacgactggtgtccactccggacacattctgtggcatgatttttctaccgtgcctagagagctttccggttcaagtcaagtcctcgaagaaacacatccagcccatcaggttggcgcatctaggccgggccctcgggacgctcaacaacacccagggagacctagggccgttcccactcagtgcgacgtgccagagaactcacgcttcgattgtgcacctgagaaggctatcacgcaagagcagtgcgaggcccgcggatgttgttacataccggctaaacaggggctgcagggtgcgcagatgggccaaccttggtgcttcttcccaccatcctatccgagttacaagctggagaatctctcccagtctgaaatgggatataccgcaacactgactcggaccaccccctccttctttcccaaagatatcttgactctgagacttgacgtaatgatggagacagaaaacaggctccactttaccattaaggaccctgccaatcgccgatacgaggtgcctctggaaacaccacacgtgcacagtagagctccatcacctctgtattctgtcgagttctccgaagagccgtttggcgttatcgtcaggaggcagctcgacgggcgagtgcttctgaacacgactgtggccccgttgttctttgcggatcagtttctgcaactgtcaacaagtctcccttctcagtacattaccgggcttgcagagcatctgtccccactcatgctgagtacttcatggaacaaaatcacactgtggaatagagaccttgctcctactccaggagccaacttgtatggttctcaccctttctacttggccctggaagatggcggatcagcgcatggcgtattcctcctgaattccaacgcaatggacgttgttcttcagccatctcctgctttgagttggagatctacaggcgggatactggacgtctacatctttctgggtccagagcctaaatccgtagtgcagcagtatcttgatgtcgtcggatacccgtttatgccaccatattggggcctggggttccacttgtgccgctggggatattcatccaccgccattacacgacaagttgttgagaatatgaccagggcacattttcctctggatgtacagtggaacgacctggactacatggatagtcgccgcgacttcaccttcaataaggatgggttcagagactttcctgctatggtccaagaacttcaccagggaggcaggaggtacatgatgatcgtagatccgggaatttcttcttctggcccagccggttcatacagaccgtatgacgaaggactgcgacgaggcgtctttatcacgaacgagactggtcagcctttgataggcaaggtttggccagggtccaccgctttcccggatttcacaaatcctgaggcactggcctggtgggaagatatggtcgccgagtttcacgaccaggtcccatttgacgggatgtggatcgacatgaacgagccatccaacttcattagaggaagtgtggatggctgtccgaataatgagctggaaaaccctccttacgtaccaggcgttgttggtgggactcttcaagctgcgacgatttgcgcatcctcccatcagttcctgtcaacccactataacttgcacaatctgtacgggacaacagaggctatcgccagtcatagggccctggtaaaagctagaggaacacgccctttcgttatctctcgctcaacttttgcaggccacggtaggtatgccggacattggaccggcgacgtctggagttcttgggaacagctggcttcctccgttccagagatattgcagtttaacctgttgggagtcccacttgtaggtgcagatgtttgtggcttcctggggaacacctcagaagaattgtgcgtaagatggactcaactgggcgccttctacccttttatgcgcaatcacaactcactgacatctttgcctcaagaaccgtactcatttagtgagccagcacagcaggccatgaggaaggctcttggcctgagatatgcacttctgccgcatctgtacacccttttccaccaggctcatgtccatggagagactgttgcacgacctctgttcttggagttcccaaaagactcttccacgtggacagtcgatcaccagatgctgtggggcgaggctctgctgattacacctgtattgcaacctggtaaggccgaagttaccgggtactttccattggggacctggtatgatctgcaaacagtcccggttgaagctcttggaagtcttccacctccacctgctgcaccaagggagcctgcgatccactctgaaggacagtgggtaactttgcctgcaccgctggacaccatcaatgtccatctgcgcgaaggctacatcataccacttcaaggtcctggactgaccactacagagtctagaaaacaaccaatggctcttgctgttgcactgactaaaagcggcgaagcaaggggtgagctgttctgggacgacggagagtcactggaggtactcgaacgaggcgcgtatacgcaggtcatttttgaggctcgcaataatacgatcgttaacgagctggtccacgtcacttcagaaggtgcaggccttcagttgggcaaggtaactgtcctgggagttgctacagcaccgcagcaggtcttgtccaacggacggcccgtaagcaactttacctatagtcctgataccaaagttctggacatctgcgttgctctgctgatgggtgagcagttcctggtatcatggtgc

SEQ ID NO: 712 - protein, 944 aa, synthetic construct
  REGION 1..944: note = Variant of the Homo Sapiens Lysosomal alpha-glucosidase
MEWSWVFLFFLSVTTGVHSGHILWHDFSTVPRELSGSSQVLEETHPAHQVGASRPGPRDAQQHPGRPRAVPTQCDVPENSRFDCAPEKAITQEQCEARGCCYIPAKQGLQGAQMGQPWCFFPPSYPSYKLENLSQSEMGYTATLTRTTPSFFPKDILTLRLDVMMETENRLHFTIKDPANRRYEVPLETPHVHSRAPSPLYSVEFSEEPFGVIVRRQLDGRVLLNTTVAPLFFADQFLQLSTSLPSQYITGLAEHLSPLMLSTSWNKITLWNRDLAPTPGANLYGSHPFYLALEDGGSAHGVFLLNSNAMDVVLQPSPALSWRSTGGILDVYIFLGPEPKSVVQQYLDVVGYPFMPPYWGLGFHLCRWGYSSTAITRQVVENMTRAHFPLDVQWNDLDYMDSRRDFTFNKDGFRDFPAMVQELHQGGRRYMMIVDPGISSSGPAGSYRPYDEGLRRGVFITNETGQPLIGKVWPGSTAFPDFTNPEALAWWEDMVAEFHDQVPFDGMWIDMNEPSNFIRGSVDGCPNNELENPPYVPGVVGGTLQAATICASSHQFLSTHYNLHNLYGTTEAIASHRALVKARGTRPFVISRSTFAGHGRYAGHWTGDVWSSWEQLASSVPEILQFNLLGVPLVGADVCGFLGNTSEELCVRWTQLGAFYPFMRNHNSLTSLPQEPYSFSEPAQQAMRKALGLRYALLPHLYTLFHQAHVHGETVARPLFLEFPKDSSTWTVDHQMLWGEALLITPVLQPGKAEVTGYFPLGTWYDLQTVPVEALGSLPPPPAAPREPAIHSEGQWVTLPAPLDTINVHLREGYIIPLQGPGLTTTESRKQPMALAVALTKSGEARGELFWDDGESLEVLERGAYTQVIFEARNNTIVNELVHVTSEGAGLQLGKVTVLGVATAPQQVLSNGRPVSNFTYSPDTKVLDICVALLMGEQFLVSWC

SEQ ID NO: 713 - DNA, 2832 bp, synthetic construct
  misc_feature 1..2832: note = Variant of the Homo Sapiens Lysosomal alpha-glucosidase
  source 1..2832: mol_type = other DNA
atggaatggagctgggtctttctcttcttcctgtcagtaacgactggtgtccactccggacacattctgtggcatgatttttctaccgtgcctagagagctttccggttcaagtcaagtcctcgaagaaacacatccagcccatcaggttggcgcatctaggccgggccctcgggacgctcaactccacccagggagacctagggccgttcccactcagtgcgacgtgccagagaactcacgcttcgattgtgcacctgagaaggctatcacgcaagagcagtgcgaggcccgcggatgttgttacataccggctaaacaggggctgcagggtgcgcagatgggccaaccttggtgcttcttcccaccatcctatccgagttacaagctggagaatctctcccagtctgaaatgggatataccgcaacactgactcggaccaccccctccttctttcccaaagatatcttgactctgagacttgacgtaatgatggagacagaaaacaggctccactttaccattaaggaccctgccaatcgccgatacgaggtgcctctggaaacaccacacgtgcacagtagagctccatcacctctgtattctgtcgagttctccgaagagccgtttggcgttatcgtcaggaggcagctcgacgggcgagtgcttctgaacacgactgtggccccgttgttctttgcggatcagtttctgcaactgtcaacaagtctcccttctcagtacattaccgggcttgcagagcatctgtccccactcatgctgagtacttcatggaacaaaatcacactgtggaatagagaccttgctcctactccaggagccaacttgtatggttctcaccctttctacttggccctggaagatggcggatcagcgcatggcgtattcctcctgaattccaacgcaatggacgttgttcttcagccatctcctgctttgagttggagatctacaggcgggatactggacgtctacatctttctgggtccagagcctaaatccgtagtgcagcagtatcttgatgtcgtcggatacccgtttatgccaccatattggggcctggggttccacttgtgccgctggggatattcatccaccgccattacacgacaagttgttgagaatatgaccagggcacattttcctctggatgtacagtggaacgacctggactacatggatagtcgccgcgacttcaccttcaataaggatgggttcagagactttcctgctatggtccaagaacttcaccagggaggcaggaggtacatgatgatcgtagatccgggaatttcttcttctggcccagccggttcatacagaccgtatgacgaaggactgcgacgaggcgtctttatcacgaacgagactggtcagcctttgataggcaaggtttggccagggtccaccgctttcccggatttcacaaatcctgaggcactggcctggtgggaagatatggtcgccgagtttcacgaccaggtcccatttgacgggatgtggatcgacatgaacgagccatccaacttcattagaggaagtgtggatggctgtccgaataatgagctggaaaaccctccttacgtaccaggcgttgttggtgggactcttcaagctgcgacgatttgcgcatcctcccatcagttcctgtcaacccactataacttgcacaatctgtacgggacaacagaggctatcgccagtcatagggccctggtaaaagctagaggaacacgccctttcgttatctctcgctcaacttttgcaggccacggtaggtatgccggacattggaccggcgacgtctggagttcttgggaacagctggcttcctccgttccagagatattgcagtttaacctgttgggagtcccacttgtaggtgcagatgtttgtggcttcctggggaacacctcagaagaattgtgcgtaagatggactcaactgggcgccttctacccttttatgcgcaatcacaactcactgacatctttgcctcaagaaccgtactcatttagtgagccagcacagcaggccatgaggaaggctcttggcctgagatatgcacttctgccgcatctgtacacccttttccaccaggctcatgtccatggagagactgttgcacgacctctgttcttggagttcccaaaagactcttccacgtggacagtcgatcaccagatgctgtggggcgaggctctgctgattacacctgtattgcaacctggtaaggccgaagttaccgggtactttccattggggacctggtatgatctgcaaacagtcccggttgaagctcttggaagtcttccacctccacctgctgcaccaagggagcctgcgatccactctgaaggacagtgggtaactttgcctgcaccgctggacaccatcaatgtccatctgcgcgaaggctacatcataccacttcaaggtcctggactgaccactacagagtctagaagccaaccaatggctcttgctgttgcactgactaaaagcggcgaagcaaggggtgagctgttctgggacgacggagagtcactggaggtactcgaacgaggcgcgtatacgcaggtcatttttgaggctcgcaataatacgatcgttaacgagctggtccacgtcacttcagaaggtgcaggccttcagttgggcaaggtaactgtcctgggagttgctacagcaccgcagcaggtcttgtccaacggacggcccgtaagcaactttacctatagtcctgataccaaagttctggacatctgcgttgctctgctgatgggtgagcagttcctggtatcatggtgc

SEQ ID NO: 714 - protein, 944 aa, synthetic construct
  REGION 1..944: note = Variant of the Homo Sapiens Lysosomal alpha-glucosidase
MEWSWVFLFFLSVTTGVHSGHILWHDFSTVPRELSGSSQVLEETHPAHQVGASRPGPRDAQLHPGRPRAVPTQCDVPENSRFDCAPEKAITQEQCEARGCCYIPAKQGLQGAQMGQPWCFFPPSYPSYKLENLSQSEMGYTATLTRTTPSFFPKDILTLRLDVMMETENRLHFTIKDPANRRYEVPLETPHVHSRAPSPLYSVEFSEEPFGVIVRRQLDGRVLLNTTVAPLFFADQFLQLSTSLPSQYITGLAEHLSPLMLSTSWNKITLWNRDLAPTPGANLYGSHPFYLALEDGGSAHGVFLLNSNAMDVVLQPSPALSWRSTGGILDVYIFLGPEPKSVVQQYLDVVGYPFMPPYWGLGFHLCRWGYSSTAITRQVVENMTRAHFPLDVQWNDLDYMDSRRDFTFNKDGFRDFPAMVQELHQGGRRYMMIVDPGISSSGPAGSYRPYDEGLRRGVFITNETGQPLIGKVWPGSTAFPDFTNPEALAWWEDMVAEFHDQVPFDGMWIDMNEPSNFIRGSVDGCPNNELENPPYVPGVVGGTLQAATICASSHQFLSTHYNLHNLYGTTEAIASHRALVKARGTRPFVISRSTFAGHGRYAGHWTGDVWSSWEQLASSVPEILQFNLLGVPLVGADVCGFLGNTSEELCVRWTQLGAFYPFMRNHNSLTSLPQEPYSFSEPAQQAMRKALGLRYALLPHLYTLFHQAHVHGETVARPLFLEFPKDSSTWTVDHQMLWGEALLITPVLQPGKAEVTGYFPLGTWYDLQTVPVEALGSLPPPPAAPREPAIHSEGQWVTLPAPLDTINVHLREGYIIPLQGPGLTTTESRSQPMALAVALTKSGEARGELFWDDGESLEVLERGAYTQVIFEARNNTIVNELVHVTSEGAGLQLGKVTVLGVATAPQQVLSNGRPVSNFTYSPDTKVLDICVALLMGEQFLVSWC

SEQ ID NO: 715 - DNA, 2832 bp, synthetic construct
  misc_feature 1..2832: note = Variant of the Homo Sapiens Lysosomal alpha-glucosidase
  source 1..2832: mol_type = other DNA
atggaatggagctgggtctttctcttcttcctgtcagtaacgactggtgtccactccggacacattctgtggcatgatttttctaccgtgcctagagagctttccggttcaagtcaagtcctcgaagaaacacatccagcccatcaggttggcgcatctaggccgggccctcgggacgctcaactccacccagggagacctagggccgttcccactcagtgcgacgtgccagagaactcacgcttcgattgtgcacctgagaaggctatcacgcaagagcagtgcgaggcccgcggatgttgttacataccggctaaacaggggctgcagggtgcgcagatgggccaaccttggtgcttcttcccaccatcctatccgagttacaagctggagaatctctcccagtctgaaatgggatataccgcaacactgactcggaccaccccctccttctttcccaaagatatcttgactctgagacttgacgtaatgatggagacagaaaacaggctccactttaccattaaggaccctgccaatcgccgatacgaggtgcctctggaaacaccacacgtgcacagtagagctccatcacctctgtattctgtcgagttctccgaagagccgtttggcgttatcgtcaggaggcagctcgacgggcgagtgcttctgaacacgactgtggccccgttgttctttgcggatcagtttctgcaactgtcaacaagtctcccttctcagtacattaccgggcttgcagagcatctgtccccactcatgctgagtacttcatggaacaaaatcacactgtggaatagagaccttgctcctactccaggagccaacttgtatggttctcaccctttctacttggccctggaagatggcggatcagcgcatggcgtattcctcctgaattccaacgcaatggacgttgttcttcagccatctcctgctttgagttggagatctacaggcgggatactggacgtctacatctttctgggtccagagcctaaatccgtagtgcagcagtatcttgatgtcgtcggatacccgtttatgccaccatattggggcctggggttccacttgtgccgctggggatattcatccaccgccattacacgacaagttgttgagaatatgaccagggcacattttcctctggatgtacagtggaacgacctggactacatggatagtcgccgcgacttcaccttcaataaggatgggttcagagactttcctgctatggtccaagaacttcaccagggaggcaggaggtacatgatgatcgtagatccgggaatttcttcttctggcccagccggttcatacagaccgtatgacgaaggactgcgacgaggcgtctttatcacgaacgagactggtcagcctttgataggcaaggtttggccagggtccaccgctttcccggatttcacaaatcctgaggcactggcctggtgggaagatatggtcgccgagtttcacgaccaggtcccatttgacgggatgtggatcgacatgaacgagccatccaacttcattagaggaagtgtggatggctgtccgaataatgagctggaaaaccctccttacgtaccaggcgttgttggtgggactcttcaagctgcgacgatttgcgcatcctcccatcagttcctgtcaacccactataacttgcacaatctgtacgggacaacagaggctatcgccagtcatagggccctggtaaaagctagaggaacacgccctttcgttatctctcgctcaacttttgcaggccacggtaggtatgccggacattggaccggcgacgtctggagttcttgggaacagctggcttcctccgttccagagatattgcagtttaacctgttgggagtcccacttgtaggtgcagatgtttgtggcttcctggggaacacctcagaagaattgtgcgtaagatggactcaactgggcgccttctacccttttatgcgcaatcacaactcactgacatctttgcctcaagaaccgtactcatttagtgagccagcacagcaggccatgaggaaggctcttggcctgagatatgcacttctgccgcatctgtacacccttttccaccaggctcatgtccatggagagactgttgcacgacctctgttcttggagttcccaaaagactcttccacgtggacagtcgatcaccagatgctgtggggcgaggctctgctgattacacctgtattgcaacctggtaaggccgaagttaccgggtactttccattggggacctggtatgatctgcaaacagtcccggttgaagctcttggaagtcttccacctccacctgctgcaccaagggagcctgcgatccactctgaaggacagtgggtaactttgcctgcaccgctggacaccatcaatgtccatctgcgctctggctacatcataccacttcaaggtcctggactgaccactacagagtctagaaaacaaccaatggctcttgctgttgcactgactaaaagcggcgaagcaaggggtgagctgttctgggacgacggagagtcactggaggtactcgaacgaggcgcgtatacgcaggtcatttttgaggctcgcaataatacgatcgttaacgagctggtccacgtcacttcagaaggtgcaggccttcagttgggcaaggtaactgtcctgggagttgctacagcaccgcagcaggtcttgtccaacggacggcccgtaagcaactttacctatagtcctgataccaaagttctggacatctgcgttgctctgctgatgggtgagcagttcctggtatcatggtgc

SEQ ID NO: 716 - protein, 944 aa, synthetic construct
  REGION 1..944: note = Variant of the Homo Sapiens Lysosomal alpha-glucosidase
MEWSWVFLFFLSVTTGVHSGHILWHDFSTVPRELSGSSQVLEETHPAHQVGASRPGPRDAQLHPGRPRAVPTQCDVPENSRFDCAPEKAITQEQCEARGCCYIPAKQGLQGAQMGQPWCFFPPSYPSYKLENLSQSEMGYTATLTRTTPSFFPKDILTLRLDVMMETENRLHFTIKDPANRRYEVPLETPHVHSRAPSPLYSVEFSEEPFGVIVRRQLDGRVLLNTTVAPLFFADQFLQLSTSLPSQYITGLAEHLSPLMLSTSWNKITLWNRDLAPTPGANLYGSHPFYLALEDGGSAHGVFLLNSNAMDVVLQPSPALSWRSTGGILDVYIFLGPEPKSVVQQYLDVVGYPFMPPYWGLGFHLCRWGYSSTAITRQVVENMTRAHFPLDVQWNDLDYMDSRRDFTFNKDGFRDFPAMVQELHQGGRRYMMIVDPGISSSGPAGSYRPYDEGLRRGVFITNETGQPLIGKVWPGSTAFPDFTNPEALAWWEDMVAEFHDQVPFDGMWIDMNEPSNFIRGSVDGCPNNELENPPYVPGVVGGTLQAATICASSHQFLSTHYNLHNLYGTTEAIASHRALVKARGTRPFVISRSTFAGHGRYAGHWTGDVWSSWEQLASSVPEILQFNLLGVPLVGADVCGFLGNTSEELCVRWTQLGAFYPFMRNHNSLTSLPQEPYSFSEPAQQAMRKALGLRYALLPHLYTLFHQAHVHGETVARPLFLEFPKDSSTWTVDHQMLWGEALLITPVLQPGKAEVTGYFPLGTWYDLQTVPVEALGSLPPPPAAPREPAIHSEGQWVTLPAPLDTINVHLRSGYIIPLQGPGLTTTESRKQPMALAVALTKSGEARGELFWDDGESLEVLERGAYTQVIFEARNNTIVNELVHVTSEGAGLQLGKVTVLGVATAPQQVLSNGRPVSNFTYSPDTKVLDICVALLMGEQFLVSWC

SEQ ID NO: 717 - DNA, 2832 bp, synthetic construct
  misc_feature 1..2832: note = Variant of the Homo Sapiens Lysosomal alpha-glucosidase
  source 1..2832: mol_type = other DNA
atggaatggagctgggtctttctcttcttcctgtcagtaacgactggtgtccactccggacacattctgtggcatgatttttctaccgtgcctagagagctttccggttcaagtcaagtcctcgaagaaacacatccagcccatcaggttggcgcatctaggccgggccctcgggacgctcaactccacccagggagacctagggccgttcccactcagtgcgacgtgccagagaactcacgcttcgattgtgcacctgagaaggctatcacgcaagagcagtgcgaggcccgcggatgttgttacataccggctaaacaggggctgcagggtgcgcagatgggccaaccttggtgcttcttcccaccatcctatccgagttacaagctggagaatctctcccagtctgaaatgggatataccgcaacactgactcggaccaccccctccttctttcccaaagatatcttgactctgagacttgacgtaatgatggagacagaaaacaggctccactttaccattaaggaccctgccaatcgccgatacgaggtgcctctggaaacaccacacgtgcacagtagagctccatcacctctgtattctgtcgagttctccgaagagccgtttggcgttatcgtcaggaggcagctcgacgggcgagtgcttctgaacacgactgtggccccgttgttctttgcggatcagtttctgcaactgtcaacaagtctcccttctcagtacattaccgggcttgcagagcatctgtccccactcatgctgagtacttcatggaacaaaatcacactgtggaatagagaccttgctcctactccaggagccaacttgtatggttctcaccctttctacttggccctggaagatggcggatcagcgcatggcgtattcctcctgaattccaacgcaatggacgttgttcttcagccatctcctgctttgagttggagatctacaggcgggatactggacgtctacatctttctgggtccagagcctaaatccgtagtgcagcagtatcttgatgtcgtcggatacccgtttatgccaccatattggggcctggggttccacttgtgccgctggggatattcatccaccgccattacacgacaagttgttgagaatatgaccagggcacattttcctctggatgtacagtggaacgacctggactacatggatagtcgccgcgacttcaccttcaataaggatgggttcagagactttcctgctatggtccaagaacttcaccagggaggcaggaggtacatgatgatcgtagatccgggaatttcttcttctggcccagccggttcatacagaccgtatgacgaaggactgcgacgaggcgtctttatcacgaacgagactggtcagcctttgataggcaaggtttggccagggtccaccgctttcccggatttcacaaatcctgaggcactggcctggtgggaagatatggtcgccgagtttcacgaccaggtcccatttgacgggatgtggatcgacatgaacgagccatccaacttcattagaggaagtgtggatggctgtccgaataatgagctggaaaaccctccttacgtaccaggcgttgttggtgggactcttcaagctgcgacgatttgcgcatcctcccatcagttcctgtcaacccactataacttgcacaatctgtacgggacaacagaggctatcgccagtcatagggccctggtaaaagctagaggaacacgccctttcgttatctctcgctcaacttttgcaggccacggtaggtatgccggacattggaccggcgacgtctggagttcttgggaacagctggcttcctccgttccagagatattgcagtttaacctgttgggagtcccacttgtaggtgcagatgtttgtggcttcctggggaacacctcagaagaattgtgcgtaagatggactcaactgggcgccttctacccttttatgcgcaatcacaactcactgacatctttgcctcaagaaccgtactcatttagtgagccagcacagcaggccatgaggaaggctcttggcctgagatatgcacttctgccgcatctgtacacccttttccaccaggctcatgtccatggagagactgttgcacgacctctgttcttggagttcccaaaagactcttccacgtggacagtcgatcaccagatgctgtggggcgaggctctgctgattacacctgtattgcaacctggtaaggccgaagttaccgggtactttccattggggacctggtatgatctgcaaacagtcccggttgaagctcttggaagtcttccacctccacctgctgcaccaagggagcctgcgatccactctgaaggacagtgggtaactttgcctgcaccgctggacaccatcaatgtccatctgcgcgaaggctacatcataccacttcaaggtcctggactgaccactacagagtctagaggacaaccaatggctcttgctgttgcactgactaaaagcggcgaagcaaggggtgagctgttctgggacgacggagagtcactggaggtactcgaacgaggcgcgtatacgcaggtcatttttgaggctcgcaataatacgatcgttaacgagctggtccacgtcacttcagaaggtgcaggccttcagttgggcaaggtaactgtcctgggagttgctacagcaccgcagcaggtcttgtccaacggacggcccgtaagcaactttacctatagtcctgataccaaagttctggacatctgcgttgctctgctgatgggtgagcagttcctggtatcatggtgc

SEQ ID NO: 718 - protein, 944 aa, synthetic construct
  REGION 1..944: note = Variant of the Homo Sapiens Lysosomal alpha-glucosidase
MEWSWVFLFFLSVTTGVHSGHILWHDFSTVPRELSGSSQVLEETHPAHQVGASRPGPRDAQLHPGRPRAVPTQCDVPENSRFDCAPEKAITQEQCEARGCCYIPAKQGLQGAQMGQPWCFFPPSYPSYKLENLSQSEMGYTATLTRTTPSFFPKDILTLRLDVMMETENRLHFTIKDPANRRYEVPLETPHVHSRAPSPLYSVEFSEEPFGVIVRRQLDGRVLLNTTVAPLFFADQFLQLSTSLPSQYITGLAEHLSPLMLSTSWNKITLWNRDLAPTPGANLYGSHPFYLALEDGGSAHGVFLLNSNAMDVVLQPSPALSWRSTGGILDVYIFLGPEPKSVVQQYLDVVGYPFMPPYWGLGFHLCRWGYSSTAITRQVVENMTRAHFPLDVQWNDLDYMDSRRDFTFNKDGFRDFPAMVQELHQGGRRYMMIVDPGISSSGPAGSYRPYDEGLRRGVFITNETGQPLIGKVWPGSTAFPDFTNPEALAWWEDMVAEFHDQVPFDGMWIDMNEPSNFIRGSVDGCPNNELENPPYVPGVVGGTLQAATICASSHQFLSTHYNLHNLYGTTEAIASHRALVKARGTRPFVISRSTFAGHGRYAGHWTGDVWSSWEQLASSVPEILQFNLLGVPLVGADVCGFLGNTSEELCVRWTQLGAFYPFMRNHNSLTSLPQEPYSFSEPAQQAMRKALGLRYALLPHLYTLFHQAHVHGETVARPLFLEFPKDSSTWTVDHQMLWGEALLITPVLQPGKAEVTGYFPLGTWYDLQTVPVEALGSLPPPPAAPREPAIHSEGQWVTLPAPLDTINVHLREGYIIPLQGPGLTTTESRGQPMALAVALTKSGEARGELFWDDGESLEVLERGAYTQVIFEARNNTIVNELVHVTSEGAGLQLGKVTVLGVATAPQQVLSNGRPVSNFTYSPDTKVLDICVALLMGEQFLVSWC

SEQ ID NO: 719 - DNA, 2832 bp, synthetic construct
  misc_feature 1..2832: note = Variant of the Homo Sapiens Lysosomal alpha-glucosidase
  source 1..2832: mol_type = other DNA
atggaatggagctgggtctttctcttcttcctgtcagtaacgactggtgtccactccggacacattctgtggcatgatttttctaccgtgcctagagagctttccggttcaagtcaagtcctcgaagaaacacatccagcccatcaggttggcgcatctaggccgggccctcgggacgctcaactccacccagggagacctagggccgttcccactcagtgcgacgtgccagagaactcacgcttcgattgtgcacctgagaaggctatcacgcaagagcagtgcgaggcccgcggatgttgttacataccggctaaacaggggctgcagggtgcgcagatgggccaaccttggtgcttcttcccaccatcctatccgagttacaagctggagaatctctcccagtctgaaatgggatataccgcaacactgactcggaccaccccctccttctttcccaaagatatcttgactctgagacttgacgtaatgatggagacagaaaacaggctccactttaccattaaggaccctgccaatcgccgatacgaggtgcctctggaaacaccacacgtgcacagtagagctccatcacctctgtattctgtcgagttctccgaagagccgtttggcgttatcgtcaggaggcagctcgacgggcgagtgcttctgaacacgactgtggccccgttgttctttgcggatcagtttctgcaactgtcaacaagtctcccttctcagtacattaccgggcttgcagagcatctgtccccactcatgctgagtacttcatggaacaaaatcacactgtggaatagagaccttgctcctactccaggagccaacttgtatggttctcaccctttctacttggccctggaagatggcggatcagcgcatggcgtattcctcctgaattccaacgcaatggacgttgttcttcagccatctcctgctttgagttggagatctacaggcgggatactggacgtctacatctttctgggtccagagcctaaatccgtagtgcagcagtatcttgatgtcgtcggatacccgtttatgccaccatattggggcctggggttccacttgtgccgctggggatattcatccaccgccattacacgacaagttgttgagaatatgaccagggcacattttcctctggatgtacagtggaacgacctggactacatggatagtcgccgcgacttcaccttcaataaggatgggttcagagactttcctgctatggtccaagaacttcaccagggaggcaggaggtacatgatgatcgtagatccgggaatttcttcttctggcccagccggttcatacagaccgtatgacgaaggactgcgacgaggcgtctttatcacgaacgagactggtcagcctttgataggcaaggtttggccagggtccaccgctttcccggatttcacaaatcctatggcactggcctggtgggaagatatggtcgccgagtttcacgaccaggtcccatttgacgggatgtggatcgacatgaacgagccatccaacttcattagaggaagtgtggatggctgtccgaataatgagctggaaaaccctccttacgtaccaggcgttgttggtgggactcttcaagctgcgacgatttgcgcatcctcccatcagttcctgtcaacccactataacttgcacaatctgtacgggacaacagaggctatcgccagtcatagggccctggtaaaagctagaggaacacgccctttcgttatctctcgctcaacttttgcaggccacggtaggtatgccggacattggaccggcgacgtctggagttcttgggaacagctggcttcctccgttccagagatattgcagtttaacctgttgggagtcccacttgtaggtgcagatgtttgtggcttcctggggaacacctcagaagaattgtgcgtaagatggactcaactgggcgccttctacccttttatgcgcaatcacaactcactgacatctttgcctcaagaaccgtactcatttagtgagccagcacagcaggccatgaggaaggctcttggcctgagatatgcacttctgccgcatctgtacacccttttccaccaggctcatgtccatggagagactgttgcacgacctctgttcttggagttcccaaaagactcttccacgtggacagtcgatcaccagatgctgtggggcgaggctctgctgattacacctgtattgcaacctggtaaggccgaagttaccgggtactttccattggggacctggtatgatctgcaaacagtcccggttgaagctcttggaagtcttccacctccacctgctgcaccaagggagcctgcgatccactctgaaggacagtgggtaactttgcctgcaccgctggacaccatcaatgtccatctgcgcgaaggctacatcataccacttcaaggtcctggactgaccactacagagtctagaaaacaaccaatggctcttgctgttgcactgactaaaagcggcgaagcaaggggtgagctgttctgggacgacggagagtcactggaggtactcgaacgaggcgcgtatacgcaggtcatttttgaggctcgcaataatacgatcgttaacgagctggtccacgtcacttcagaaggtgcaggccttcagttgggcaaggtaactgtcctgggagttgctacagcaccgcagcaggtcttgtccaacggacggcccgtaagcaactttacctatagtcctgataccaaagttctggacatctgcgttgctctgctgatgggtgagcagttcctggtatcatggtgc

SEQ ID NO: 720 - protein, 944 aa, synthetic construct
  REGION 1..944: note = Variant of the Homo Sapiens Lysosomal alpha-glucosidase
MEWSWVFLFFLSVTTGVHSGHILWHDFSTVPRELSGSSQVLEETHPAHQVGASRPGPRDAQLHPGRPRAVPTQCDVPENSRFDCAPEKAITQEQCEARGCCYIPAKQGLQGAQMGQPWCFFPPSYPSYKLENLSQSEMGYTATLTRTTPSFFPKDILTLRLDVMMETENRLHFTIKDPANRRYEVPLETPHVHSRAPSPLYSVEFSEEPFGVIVRRQLDGRVLLNTTVAPLFFADQFLQLSTSLPSQYITGLAEHLSPLMLSTSWNKITLWNRDLAPTPGANLYGSHPFYLALEDGGSAHGVFLLNSNAMDVVLQPSPALSWRSTGGILDVYIFLGPEPKSVVQQYLDVVGYPFMPPYWGLGFHLCRWGYSSTAITRQVVENMTRAHFPLDVQWNDLDYMDSRRDFTFNKDGFRDFPAMVQELHQGGRRYMMIVDPGISSSGPAGSYRPYDEGLRRGVFITNETGQPLIGKVWPGSTAFPDFTNPMALAWWEDMVAEFHDQVPFDGMWIDMNEPSNFIRGSVDGCPNNELENPPYVPGVVGGTLQAATICASSHQFLSTHYNLHNLYGTTEAIASHRALVKARGTRPFVISRSTFAGHGRYAGHWTGDVWSSWEQLASSVPEILQFNLLGVPLVGADVCGFLGNTSEELCVRWTQLGAFYPFMRNHNSLTSLPQEPYSFSEPAQQAMRKALGLRYALLPHLYTLFHQAHVHGETVARPLFLEFPKDSSTWTVDHQMLWGEALLITPVLQPGKAEVTGYFPLGTWYDLQTVPVEALGSLPPPPAAPREPAIHSEGQWVTLPAPLDTINVHLREGYIIPLQGPGLTTTESRKQPMALAVALTKSGEARGELFWDDGESLEVLERGAYTQVIFEARNNTIVNELVHVTSEGAGLQLGKVTVLGVATAPQQVLSNGRPVSNFTYSPDTKVLDICVALLMGEQFLVSWC

SEQ ID NO: 721 - DNA, 2832 bp, synthetic construct
  misc_feature 1..2832: note = Variant of the Homo Sapiens Lysosomal alpha-glucosidase
  source 1..2832: mol_type = other DNA
atggaatggagctgggtctttctcttcttcctgtcagtaacgactggtgtccactccggacacattctgtggcatgatttttctaccgtgcctagagagctttccggttcaagtcaagtcctcgaagaaacacatccagcccatcaggttggcgcatctaggccgggccctcgggacgctcaactccacccagggagacctagggccgttcccactcagtgcgacgtgccagagaactcacgcttcgattgtgcacctgagaaggctatcacgcaagagcagtgcgaggcccgcggatgttgttacataccggctaaacaggggctgcagggtgcgcagatgggccaaccttggtgcttcttcccaccatcctatccgagttacaagctggagaatctctcccagtctgaaatgggatataccgcaacactgactcggaccaccccctccttctttcccaaagatatcttgactctgagacttgacgtaatgatggagacagaaaacaggctccactttaccattaaggaccctgccaatcgccgatacgaggtgcctctggaaacaccacacgtgcacagtagagctccatcacctctgtattctgtcgagttctccgaagagccgtttggcgttatcgtcaggaggcagctcgacgggcgagtgcttctgaacacgactgtggccccgttgttctttgcggatcagtttctgcaactgtcaacaagtctcccttctcagtacattaccgggcttgcagagcatctgtccccactcatgctgagtacttcatggaacaaaatcacactgtggaatagagaccttgctcctactccaggagccaacttgtatggttctcaccctttctacttggccctggaagatggcggatcagcgcatggcgtattcctcctgaattccaacgcaatggacgttgttcttcagccatctcctgctttgagttggagatctacaggcgggatactggacgtctacatctttctgggtccagagcctaaatccgtagtgcagcagtatcttgatgtcgtcggatacccgtttatgccaccatattggggcctggggttccacttgtgccgctggggatattcatccaccgccattacacgacaagttgttgagaatatgaccagggcacattttcctctggatgtacagtggaacgacctggactacatggatagtcgccgcgacttcaccttcaataaggatgggttcagagactttcctgctatggtccaagaacttcaccagggaggcaggaggtacatgatgatcgtagatccgggaatttcttcttctggcccagccggttcatacagaccgtatgacgaaggactgcgacgaggcgtctttatcacgaacgagactggtcagcctttgataggcaaggtttggccagggtccaccgctttcccggatttcacaaatcctgaggcactggcctggtgggaagatatggtcgccgagtttcacgaccaggtcccatttgacgggatgtggatcgacatgaacgagccatccaacttcattagaggaagtgtggatggctgtccgaataatgagctggaaaaccctccttacgtaccaggcgttgttggtgggactcttcaagctgcgacgatttgcgcatcctcccatcagttcctgtcaacccactataacttgcacaatctgtacgggacaacagaggctatcgccagtcatagggccctggtaaaagctagaggaacacgccctttcgttatctctcgctcaacttttgcaggccacggtaggtatgccggacattggaccggcgacgtctggagttcttgggaacagctggcttcctccgttccagagatattgcagtttaacctgttgggagtcccacttgtaggtgcagatgtttgtggcttcctggggaacacctcagaagaattgtgcgtaagatggactcaactgggcgccttctacccttttatgcgcaatcacaactcactgacatctttgcctcaagaaccgtactcatttagtgagccagcacagcaggccatgaggaaggctcttggcctgagatatgcacttctgccgcatctgtacacccttttccaccaggctcatgtcaagggagagactgttgcacgacctctgttcttggagttcccaaaagactcttccacgtggacagtcgatcaccagatgctgtggggcgaggctctgctgattacacctgtattgcaacctggtaaggccgaagttaccgggtactttccattggggacctggtatgatctgcaaacagtcccggttgaagctcttggaagtcttccacctccacctgctgcaccaagggagcctgcgatccactctgaaggacagtgggtaactttgcctgcaccgctggacaccatcaatgtccatctgcgcgaaggctacatcataccacttcaaggtcctggactgaccactacagagtctagaaaacaaccaatggctcttgctgttgcactgactaaaagcggcgaagcaaggggtgagctgttctgggacgacggagagtcactggaggtactcgaacgaggcgcgtatacgcaggtcatttttgaggctcgcaataatacgatcgttaacgagctggtccacgtcacttcagaaggtgcaggccttcagttgggcaaggtaactgtcctgggagttgctacagcaccgcagcaggtcttgtccaacggacggcccgtaagcaactttacctatagtcctgataccaaagttctggacatctgcgttgctctgctgatgggtgagcagttcctggtatcatggtgc

SEQ ID NO: 722 - protein, 944 aa, synthetic construct
  REGION 1..944: note = Variant of the Homo Sapiens Lysosomal alpha-glucosidase
MEWSWVFLFFLSVTTGVHSGHILWHDFSTVPRELSGSSQVLEETHPAHQVGASRPGPRDAQLHPGRPRAVPTQCDVPENSRFDCAPEKAITQEQCEARGCCYIPAKQGLQGAQMGQPWCFFPPSYPSYKLENLSQSEMGYTATLTRTTPSFFPKDILTLRLDVMMETENRLHFTIKDPANRRYEVPLETPHVHSRAPSPLYSVEFSEEPFGVIVRRQLDGRVLLNTTVAPLFFADQFLQLSTSLPSQYITGLAEHLSPLMLSTSWNKITLWNRDLAPTPGANLYGSHPFYLALEDGGSAHGVFLLNSNAMDVVLQPSPALSWRSTGGILDVYIFLGPEPKSVVQQYLDVVGYPFMPPYWGLGFHLCRWGYSSTAITRQVVENMTRAHFPLDVQWNDLDYMDSRRDFTFNKDGFRDFPAMVQELHQGGRRYMMIVDPGISSSGPAGSYRPYDEGLRRGVFITNETGQPLIGKVWPGSTAFPDFTNPEALAWWEDMVAEFHDQVPFDGMWIDMNEPSNFIRGSVDGCPNNELENPPYVPGVVGGTLQAATICASSHQFLSTHYNLHNLYGTTEAIASHRALVKARGTRPFVISRSTFAGHGRYAGHWTGDVWSSWEQLASSVPEILQFNLLGVPLVGADVCGFLGNTSEELCVRWTQLGAFYPFMRNHNSLTSLPQEPYSFSEPAQQAMRKALGLRYALLPHLYTLFHQAHVKGETVARPLFLEFPKDSSTWTVDHQMLWGEALLITPVLQPGKAEVTGYFPLGTWYDLQTVPVEALGSLPPPPAAPREPAIHSEGQWVTLPAPLDTINVHLREGYIIPLQGPGLTTTESRKQPMALAVALTKSGEARGELFWDDGESLEVLERGAYTQVIFEARNNTIVNELVHVTSEGAGLQLGKVTVLGVATAPQQVLSNGRPVSNFTYSPDTKVLDICVALLMGEQFLVSWC

SEQ ID NO: 723 - DNA, 2832 bp, synthetic construct
  misc_feature 1..2832: note = Variant of the Homo Sapiens Lysosomal alpha-glucosidase
  source 1..2832: mol_type = other DNA
atggaatggagctgggtctttctcttcttcctgtcagtaacgactggtgtccactccggacacattctgtggcatgatttttctaccgtgcctagagagctttccggttcaagtcaagtcctcgaagaaacacatccagcccatcaggttggcgcatctaggccgggccctcgggacgctcaactccacccagggagacctagggccgttcccactcagtgcgacgtgccagagaactcacgcttcgattgtgcacctgagaaggctatcacgcaagagcagtgcgaggcccgcggatgttgttacataccggctaaacaggggctgcagggtgcgcagatgggccaaccttggtgcttcttcccaccatcctatccgagttacaagctggagaatctctcccagtctgaaatgggatataccgcaacactgactcggaccaccccctccttctttcccaaagatatcttgactctgagacttgacgtaatgatggagacagaaaacaggctccactttaccattaaggaccctgccaatcgccgatacgaggtgcctctggaaacaccacacgtgcacagtagagctccatcacctctgtattctgtcgagttctccgaagagccgtttggcgttatcgtcaggaggcagctcgacgggcgagtgcttctgaacacgactgtggccccgttgttctttgcggatcagtttctgcaactgtcaacaagtctcccttctcagtacattaccgggcttgcagagcatctgtccccactcatgctgagtacttcatggaacaaaatcacactgtggaatagagaccttgctcctactccaggagccaacttgtatggttctcaccctttctacttggccctggaagatggcggatcagcgcatggcgtattcctcctgaattccaacgcaatggacgttgttcttcagccatctcctgctttgagttggagatctacaggcgggatactggacgtctacatctttctgggtccagagcctaaatccgtagtgcagcagtatcttgatgtcgtcggatacccgtttatgccaccatattggggcctggggttccacttgtgccgctggggatattcatccaccgccattacacgacaagttgttgagaatatgaccagggcacattttcctctggatgtacagtggaacgacctggactacatggatagtcgccgcgacttcaccttcaataaggatgggttcagagactttcctgctatggtccaagaacttcaccagggaggcaggaggtacatgatgatcgtagatccgggaatttcttcttctggcccagccggttcatacagaccgtatgacgaaggactgcgacgaggcgtctttatcacgaacgagactggtcagcctttgataggcaaggtttggccagggtccaccgctttcccggatttcacaaatcctgaggcactggcctggtgggaagatatggtcgccgagtttcacgaccaggtcccatttgacgggatgtggatcgacatgaacgagccatccaacttcattagaggaagtgtggatggctgtccgaataatgagctggaaaaccctccttacgtaccaggcgttgttggtgggactcttcaagctgcgacgatttgcgcatcctcccatcagttcctgtcaacccactataacttgcacaatctgtacgggacaacagaggctatcgccagtcatagggccctggtaaaagctagaggaacacgccctttcgttatctctcgctcaacttttgcaggccacggtaggtatgccggacattggaccggcgacgtctggagttcttgggaacagctggcttcctccgttccagagatattgcagtttaacctgttgggagtcccacttgtaggtgcagatgtttgtggcttcctggggaacacctcagaagaattgtgcgtaagatggactcaactgggcgccttctacccttttatgcgcaatcacaactcactgacatctttgcctcaagaaccgtactcatttagtgagccagcacagcaggccatgaggaaggctcttggcctgagatatgcacttctgccgcatctgtacacccttttccaccaggctcatgtccatggagagactgttgcacgacctctgttcttggagttcccaaaagactcttccacgtggacagtcgatcaccagatgctgtggggcgaggctctgctgattacacctgtattgcaacctggtaaggccgaagttaccgggtactttccattggggacctggtatgatctgcaaacagtcccggttgaagctcttggaagtcttccacctccacctgctgcaccaagggagcctgcgatccactctgaaggacagtgggtaactttgcctgcaccgctggacaccatcaatgtccatctgcgcgaaggctacatcataccacttcaaggtcctggactgaccactacagagtctagaaaacaaccaatggctcttgctgttgcactgactaaaagcggcgaagcaaggggtgagctgttctgggacgacggagagtcactggaggtactcgaacgaggcgcgtatacgcaggtcatttttgaggctcgcaataatacgatcgttaacgagctggtccacgtcacttcagaaggtgcaggccttcagttgggcaaggtaactgtcctgggagttgctacagcaccgcagcaggtcttgtccaacggacggcccgtaagcaactttacctatagtcctgataccaaagttctggacatctgcgttcatctgctgatgggtgagcagttcctggtatcatggtgc

SEQ ID NO: 724 - protein, 944 aa, synthetic construct
  REGION 1..944: note = Variant of the Homo Sapiens Lysosomal alpha-glucosidase
MEWSWVFLFFLSVTTGVHSGHILWHDFSTVPRELSGSSQVLEETHPAHQVGASRPGPRDAQLHPGRPRAVPTQCDVPENSRFDCAPEKAITQEQCEARGCCYIPAKQGLQGAQMGQPWCFFPPSYPSYKLENLSQSEMGYTATLTRTTPSFFPKDILTLRLDVMMETENRLHFTIKDPANRRYEVPLETPHVHSRAPSPLYSVEFSEEPFGVIVRRQLDGRVLLNTTVAPLFFADQFLQLSTSLPSQYITGLAEHLSPLMLSTSWNKITLWNRDLAPTPGANLYGSHPFYLALEDGGSAHGVFLLNSNAMDVVLQPSPALSWRSTGGILDVYIFLGPEPKSVVQQYLDVVGYPFMPPYWGLGFHLCRWGYSSTAITRQVVENMTRAHFPLDVQWNDLDYMDSRRDFTFNKDGFRDFPAMVQELHQGGRRYMMIVDPGISSSGPAGSYRPYDEGLRRGVFITNETGQPLIGKVWPGSTAFPDFTNPEALAWWEDMVAEFHDQVPFDGMWIDMNEPSNFIRGSVDGCPNNELENPPYVPGVVGGTLQAATICASSHQFLSTHYNLHNLYGTTEAIASHRALVKARGTRPFVISRSTFAGHGRYAGHWTGDVWSSWEQLASSVPEILQFNLLGVPLVGADVCGFLGNTSEELCVRWTQLGAFYPFMRNHNSLTSLPQEPYSFSEPAQQAMRKALGLRYALLPHLYTLFHQAHVHGETVARPLFLEFPKDSSTWTVDHQMLWGEALLITPVLQPGKAEVTGYFPLGTWYDLQTVPVEALGSLPPPPAAPREPAIHSEGQWVTLPAPLDTINVHLREGYIIPLQGPGLTTTESRKQPMALAVALTKSGEARGELFWDDGESLEVLERGAYTQVIFEARNNTIVNELVHVTSEGAGLQLGKVTVLGVATAPQQVLSNGRPVSNFTYSPDTKVLDICVHLLMGEQFLVSWC

SEQ ID NO: 725 - DNA, 2832 bp, synthetic construct
  misc_feature 1..2832: note = Variant of the Homo Sapiens Lysosomal alpha-glucosidase
  source 1..2832: mol_type = other DNA
atggaatggagctgggtctttctcttcttcctgtcagtaacgactggtgtccactccggacacattctgtggcatgatttttctccagtgcctagagagctttccggttcaagtcaagtcctcgaagaaacacatccagcccatcaggttggcgcatctaggccgggccctcgggacgctcaactccacccagggagacctagggccgttcccactcagtgcgacgtgccagagaactcacgcttcgattgtgcacctgagaaggctatcacgcaagagcagtgcgaggcccgcggatgttgttacataccggctaaacaggggctgcagggtgcgcagatgggccaaccttggtgcttcttcccaccatcctatccgagttacaagctggagaatctctcccagtctgaaatgggatataccgcaacactgactcggaccaccccctccttctttcccaaagatatcttgactctgagacttgacgtaatgatggagacagaaaacaggctccactttaccattaaggaccctgccaatcgccgatacgaggtgcctctggaaacaccacacgtgcacagtagagctccatcacctctgtattctgtcgagttctccgaagagccgtttggcgttatcgtcaggaggcagctcgacgggcgagtgcttctgaacacgactgtggccccgttgttctttgcggatcagtttctgcaactgtcaacaagtctcccttctcagtacattaccgggcttgcagagcatctgtccccactcatgctgagtacttcatggaacaaaatcacactgtggaatagagaccttgctcctactccaggagccaacttgtatggttctcaccctttctacttggccctggaagatggcggatcagcgcatggcgtattcctcctgaattccaacgcaatggacgttgttcttcagccatctcctgctttgagttggagatctacaggcgggatactggacgtctacatctttctgggtccagagcctaaatccgtagtgcagcagtatcttgatgtcgtcggatacccgtttatgccaccatattggggcctggggttccacttgtgccgctggggatattcatccaccgccattacacgacaagttgttgagaatatgaccagggcacattttcctctggatgtacagtggaacgacctggactacatggatagtcgccgcgacttcaccttcaataaggatgggttcagagactttcctgctatggtccaagaacttcaccagggaggcaggaggtacatgatgatcgtagatccgggaatttcttcttctggcccagccggttcatacagaccgtatgacgaaggactgcgacgaggcgtctttatcacgaacgagactggtcagcctttgataggcaaggtttggccagggtccaccgctttcccggatttcacaaatcctgaggcactggcctggtgggaagatatggtcgccgagtttcacgaccaggtcccatttgacgggatgtggatcgacatgaacgagccatccaacttcattagaggaagtgtggatggctgtccgaataatgagctggaaaaccctccttacgtaccaggcgttgttggtgggactcttcaagctgcgacgatttgcgcatcctcccatcagttcctgtcaacccactataacttgcacaatctgtacgggacaacagaggctatcgccagtcatagggccctggtaaaagctagaggaacacgccctttcgttatctctcgctcaacttttgcaggccacggtaggtatgccggacattggaccggcgacgtctggagttcttgggaacagctggcttcctccgttccagagatattgcagtttaacctgttgggagtcccacttgtaggtgcagatgtttgtggcttcctggggaacacctcagaagaattgtgcgtaagatggactcaactgggcgccttctacccttttatgcgcaatcacaactcactgacatctttgcctcaagaaccgtactcatttagtgagccagcacagcaggccatgaggaaggctcttggcctgagatatgcacttctgccgcatctgtacacccttttccaccaggctcatgtccatggagagactgttgcacgacctctgttcttggagttcccaaaagactcttccacgtggacagtcgatcaccagatgctgtggggcgaggctctgctgattacacctgtattgcaacctggtaaggccgaagttaccgggtactttccattggggacctggtatgatctgcaaacagtcccggttgaagctcttggaagtcttccacctccacctgctgcaccaagggagcctgcgatccactctgaaggacagtgggtaactttgcctgcaccgctggacaccatcaatgtccatctgcgcgaaggctacatcataccacttcaaggtcctggactgaccactacagagtctagaaaacaaccaatggctcttgctgttgcactgactaaaagcggcgaagcaaggggtgagctgttctgggacgacggagagtcactggaggtactcgaacgaggcgcgtatacgcaggtcatttttgaggctcgcaataatacgatcgttaacgagctggtccacgtcacttcagaaggtgcaggccttcagttgggcaaggtaactgtcctgggagttgctacagcaccgcagcaggtcttgtccaacggacggcccgtaagcaactttacctatagtcctgataccaaagttctggacatctgcgttgctctgctgatgggtgagcagttcctggtatcatggtgc

SEQ ID NO: 726 - protein, 944 aa, synthetic construct
  REGION 1..944: note = Variant of the Homo Sapiens Lysosomal alpha-glucosidase
MEWSWVFLFFLSVTTGVHSGHILWHDFSPVPRELSGSSQVLEETHPAHQVGASRPGPRDAQLHPGRPRAVPTQCDVPENSRFDCAPEKAITQEQCEARGCCYIPAKQGLQGAQMGQPWCFFPPSYPSYKLENLSQSEMGYTATLTRTTPSFFPKDILTLRLDVMMETENRLHFTIKDPANRRYEVPLETPHVHSRAPSPLYSVEFSEEPFGVIVRRQLDGRVLLNTTVAPLFFADQFLQLSTSLPSQYITGLAEHLSPLMLSTSWNKITLWNRDLAPTPGANLYGSHPFYLALEDGGSAHGVFLLNSNAMDVVLQPSPALSWRSTGGILDVYIFLGPEPKSVVQQYLDVVGYPFMPPYWGLGFHLCRWGYSSTAITRQVVENMTRAHFPLDVQWNDLDYMDSRRDFTFNKDGFRDFPAMVQELHQGGRRYMMIVDPGISSSGPAGSYRPYDEGLRRGVFITNETGQPLIGKVWPGSTAFPDFTNPEALAWWEDMVAEFHDQVPFDGMWIDMNEPSNFIRGSVDGCPNNELENPPYVPGVVGGTLQAATICASSHQFLSTHYNLHNLYGTTEAIASHRALVKARGTRPFVISRSTFAGHGRYAGHWTGDVWSSWEQLASSVPEILQFNLLGVPLVGADVCGFLGNTSEELCVRWTQLGAFYPFMRNHNSLTSLPQEPYSFSEPAQQAMRKALGLRYALLPHLYTLFHQAHVHGETVARPLFLEFPKDSSTWTVDHQMLWGEALLITPVLQPGKAEVTGYFPLGTWYDLQTVPVEALGSLPPPPAAPREPAIHSEGQWVTLPAPLDTINVHLREGYIIPLQGPGLTTTESRKQPMALAVALTKSGEARGELFWDDGESLEVLERGAYTQVIFEARNNTIVNELVHVTSEGAGLQLGKVTVLGVATAPQQVLSNGRPVSNFTYSPDTKVLDICVALLMGEQFLVSWC

SEQ ID NO: 727 - DNA, 2832 bp, synthetic construct
  misc_feature 1..2832: note = Variant of the Homo Sapiens Lysosomal alpha-glucosidase
  source 1..2832: mol_type = other DNA
atggaatggagctgggtctttctcttcttcctgtcagtaacgactggtgtccactccggacacattctgtggcatgatttttctaccgtgcctagagagctttccggttcaagtcaagtcctcgaagaaacacatccagcccatcaggttggcgcatctaggccgggccctcgggacgctcaactccacccagggagacctagggccgttcccactcagtgcgacgtgccagagaactcacgcttcgattgtgcacctgagaaggctatcacgcaagagcagtgcgaggcccgcggatgttgttacataccggctaaacaggggctgcagggtgcgcagatgggccaaccttggtgcttcttcccaccatcctatccgagttacaagctggagaatctctcccagtctgaaatgggatataccgcaacactgactcggaccaccccctccttctttcccaaagatatcttgactctgagacttgacgtaatgatggagacagaaaacaggctccactttaccattaaggaccctgccaatcgccgatacgaggtgcctctggaaacaccacacgtgcacagtagagctccatcacctctgtattctgtcgagttctccgaagagccgtttggcgttatcgtcaggaggcagctcgacgggcgagtgcttctgaacacgactgtggccccgttgttctttgcggatcagtttctgcaactgtcaacaagtctcccttctcagtacattaccgggcttgcagagcatctgtccccactcatgctgagtacttcatggaacaaaatcacactgtggaatagagaccttgctcctactccaggagccaacttgtatggttctcaccctttctacttggccctggaagatggcggatcagcgcatggcgtattcctcctgaattccaacgcaatggacgttgttcttcagccatctcctgctttgagttggagatctacaggcgggatactggacgtctacatctttctgggtccagagcctaaatccgtagtgcagcagtatcttgatgtcgtcggatacccgtttatgccaccatattggggcctggggttccacttgtgccgctggggatattcatccaccgccattacacgacaagttgttgagaatatgaccagggcacattttcctctggatgtacagtggaacgacctggactacatggatagtcgccgcgacttcaccttcaataaggatgggttcagagactttcctgctatggtccaagaacttcaccagggaggcaggaggtacatgatgatcgtagatccgggaatttcttcttctggcccagccggttcatacagaccgtatgacgaaggactgcgacgaggcgtctttatcacgaacgagactggtcagcctttgataggcaaggtttggccagggtccaccgctttcccggatttcacaaatcctgaggcactggcctggtgggaagatatggtcgccgagtttcacgaccaggtcccatttgacgggatgtggatcgacatgaacgagccatccaacttcattagaggaagtgtggatggctgtccgaataatgagctggaaaaccctccttacgtaccaggcgttgttggtgggactcttcaagctgcgacgatttgcgcatcctcccatcagttcctgtcaacccactataacttgcacaatctgtacgggacaacagaggctatcgccagtcatagggccctggtaaaagctagaggaacacgccctttcgttatctctcgctcaacttttgcaggccacggtaggtatgccggacattggaccggcgacgtctggagttcttgggaacagctggcttcctccgttccagagatattgcagtttaacctgttgggagtcccacttgtaggtgcagatgtttgtggcttcctggggaacacctcagaagaattgtgcgtaagatggactcaactgggcgccttctacccttttatgcgcaatcacaactcactgacatctttgcctcaagaaccgtactcatttagtgagccagcacagcaggccatgaggaaggctctttggctgagatatgcacttctgccgcatctgtacacccttttccaccaggctcatgtccatggagagactgttgcacgacctctgttcttggagttcccaaaagactcttccacgtggacagtcgatcaccagatgctgtggggcgaggctctgctgattacacctgtattgcaacctggtaaggccgaagttaccgggtactttccattggggacctggtatgatctgcaaacagtcccggttgaagctcttggaagtcttccacctccacctgctgcaccaagggagcctgcgatccactctgaaggacagtgggtaactttgcctgcaccgctggacaccatcaatgtccatctgcgcgaaggctacatcataccacttcaaggtcctggactgaccactacagagtctagaaaacaaccaatggctcttgctgttgcactgactaaaagcggcgaagcaaggggtgagctgttctgggacgacggagagtcactggaggtactcgaacgaggcgcgtatacgcaggtcatttttgaggctcgcaataatacgatcgttaacgagctggtccacgtcacttcagaaggtgcaggccttcagttgggcaaggtaactgtcctgggagttgctacagcaccgcagcaggtcttgtccaacggacggcccgtaagcaactttacctatagtcctgataccaaagttctggacatctgcgttgctctgctgatgggtgagcagttcctggtatcatggtgc

SEQ ID NO: 728 - protein, 944 aa, synthetic construct
  REGION 1..944: note = Variant of the Homo Sapiens Lysosomal alpha-glucosidase
MEWSWVFLFFLSVTTGVHSGHILWHDFSTVPRELSGSSQVLEETHPAHQVGASRPGPRDAQLHPGRPRAVPTQCDVPENSRFDCAPEKAITQEQCEARGCCYIPAKQGLQGAQMGQPWCFFPPSYPSYKLENLSQSEMGYTATLTRTTPSFFPKDILTLRLDVMMETENRLHFTIKDPANRRYEVPLETPHVHSRAPSPLYSVEFSEEPFGVIVRRQLDGRVLLNTTVAPLFFADQFLQLSTSLPSQYITGLAEHLSPLMLSTSWNKITLWNRDLAPTPGANLYGSHPFYLALEDGGSAHGVFLLNSNAMDVVLQPSPALSWRSTGGILDVYIFLGPEPKSVVQQYLDVVGYPFMPPYWGLGFHLCRWGYSSTAITRQVVENMTRAHFPLDVQWNDLDYMDSRRDFTFNKDGFRDFPAMVQELHQGGRRYMMIVDPGISSSGPAGSYRPYDEGLRRGVFITNETGQPLIGKVWPGSTAFPDFTNPEALAWWEDMVAEFHDQVPFDGMWIDMNEPSNFIRGSVDGCPNNELENPPYVPGVVGGTLQAATICASSHQFLSTHYNLHNLYGTTEAIASHRALVKARGTRPFVISRSTFAGHGRYAGHWTGDVWSSWEQLASSVPEILQFNLLGVPLVGADVCGFLGNTSEELCVRWTQLGAFYPFMRNHNSLTSLPQEPYSFSEPAQQAMRKALWLRYALLPHLYTLFHQAHVHGETVARPLFLEFPKDSSTWTVDHQMLWGEALLITPVLQPGKAEVTGYFPLGTWYDLQTVPVEALGSLPPPPAAPREPAIHSEGQWVTLPAPLDTINVHLREGYIIPLQGPGLTTTESRKQPMALAVALTKSGEARGELFWDDGESLEVLERGAYTQVIFEARNNTIVNELVHVTSEGAGLQLGKVTVLGVATAPQQVLSNGRPVSNFTYSPDTKVLDICVALLMGEQFLVSWC

SEQ ID NO: 729 - DNA, 2832 bp, synthetic construct
  misc_feature 1..2832: note = Variant of the Homo Sapiens Lysosomal alpha-glucosidase
  source 1..2832: mol_type = other DNA
atggaatggagctgggtctttctcttcttcctgtcagtaacgactggtgtccactccggacacattctgtggcatgatttttcttacgtgcctagagagctttccggttcaagtcaagtcctcgaagaaacacatccagcccatcaggttggcgcatctaggccgggccctcgggacgctcaactccacccagggagacctagggccgttcccactcagtgcgacgtgccagagaactcacgcttcgattgtgcacctgagaaggctatcacgcaagagcagtgcgaggcccgcggatgttgttacataccggctaaacaggggctgcagggtgcgcagatgggccaaccttggtgcttcttcccaccatcctatccgagttacaagctggagaatctctcccagtctgaaatgggatataccgcaacactgactcggaccaccccctccttctttcccaaagatatcttgactctgagacttgacgtaatgatggagacagaaaacaggctccactttaccattaaggaccctgccaatcgccgatacgaggtgcctctggaaacaccacacgtgcacagtagagctccatcacctctgtattctgtcgagttctccgaagagccgtttggcgttatcgtcaggaggcagctcgacgggcgagtgcttctgaacacgactgtggccccgttgttctttgcggatcagtttctgcaactgtcaacaagtctcccttctcagtacattaccgggcttgcagagcatctgtccccactcatgctgagtacttcatggaacaaaatcacactgtggaatagagaccttgctcctactccaggagccaacttgtatggttctcaccctttctacttggccctggaagatggcggatcagcgcatggcgtattcctcctgaattccaacgcaatggacgttgttcttcagccatctcctgctttgagttggagatctacaggcgggatactggacgtctacatctttctgggtccagagcctaaatccgtagtgcagcagtatcttgatgtcgtcggatacccgtttatgccaccatattggggcctggggttccacttgtgccgctggggatattcatccaccgccattacacgacaagttgttgagaatatgaccagggcacattttcctctggatgtacagtggaacgacctggactacatggatagtcgccgcgacttcaccttcaataaggatgggttcagagactttcctgctatggtccaagaacttcaccagggaggcaggaggtacatgatgatcgtagatccgggaatttcttcttctggcccagccggttcatacagaccgtatgacgaaggactgcgacgaggcgtctttatcacgaacgagactggtcagcctttgataggcaaggtttggccagggtccaccgctttcccggatttcacaaatcctgaggcactggcctggtgggaagatatggtcgccgagtttcacgaccaggtcccatttgacgggatgtggatcgacatgaacgagccatccaacttcattagaggaagtgtggatggctgtccgaataatgagctggaaaaccctccttacgtaccaggcgttgttggtgggactcttcaagctgcgacgatttgcgcatcctcccatcagttcctgtcaacccactataacttgcacaatctgtacgggacaacagaggctatcgccagtcatagggccctggtaaaagctagaggaacacgccctttcgttatctctcgctcaacttttgcaggccacggtaggtatgccggacattggaccggcgacgtctggagttcttgggaacagctggcttcctccgttccagagatattgcagtttaacctgttgggagtcccacttgtaggtgcagatgtttgtggcttcctggggaacacctcagaagaattgtgcgtaagatggactcaactgggcgccttctacccttttatgcgcaatcacaactcactgacatctttgcctcaagaaccgtactcatttagtgagccagcacagcaggccatgaggaaggctcttggcctgagatatgcacttctgccgcatctgtacacccttttccaccaggctcatgtccatggagagactgttgcacgacctctgttcttggagttcccaaaagactcttccacgtggacagtcgatcaccagatgctgtggggcgaggctctgctgattacacctgtattgcaacctggtaaggccgaagttaccgggtactttccattggggacctggtatgatctgcaaacagtcccggttgaagctcttggaagtcttccacctccacctgctgcaccaagggagcctgcgatccactctgaaggacagtgggtaactttgcctgcaccgctggacaccatcaatgtccatctgcgcgaaggctacatcataccacttcaaggtcctggactgaccactacagagtctagaaaacaaccaatggctcttgctgttgcactgactaaaagcggcgaagcaaggggtgagctgttctgggacgacggagagtcactggaggtactcgaacgaggcgcgtatacgcaggtcatttttgaggctcgcaataatacgatcgttaacgagctggtccacgtcacttcagaaggtgcaggccttcagttgggcaaggtaactgtcctgggagttgctacagcaccgcagcaggtcttgtccaacggacggcccgtaagcaactttacctatagtcctgataccaaagttctggacatctgcgttgctctgctgatgggtgagcagttcctggtatcatggtgc

SEQ ID NO: 730 - protein, 944 aa, synthetic construct
  REGION 1..944: note = Variant of the Homo Sapiens Lysosomal alpha-glucosidase
MEWSWVFLFFLSVTTGVHSGHILWHDFSYVPRELSGSSQVLEETHPAHQVGASRPGPRDAQLHPGRPRAVPTQCDVPENSRFDCAPEKAITQEQCEARGCCYIPAKQGLQGAQMGQPWCFFPPSYPSYKLENLSQSEMGYTATLTRTTPSFFPKDILTLRLDVMMETENRLHFTIKDPANRRYEVPLETPHVHSRAPSPLYSVEFSEEPFGVIVRRQLDGRVLLNTTVAPLFFADQFLQLSTSLPSQYITGLAEHLSPLMLSTSWNKITLWNRDLAPTPGANLYGSHPFYLALEDGGSAHGVFLLNSNAMDVVLQPSPALSWRSTGGILDVYIFLGPEPKSVVQQYLDVVGYPFMPPYWGLGFHLCRWGYSSTAITRQVVENMTRAHFPLDVQWNDLDYMDSRRDFTFNKDGFRDFPAMVQELHQGGRRYMMIVDPGISSSGPAGSYRPYDEGLRRGVFITNETGQPLIGKVWPGSTAFPDFTNPEALAWWEDMVAEFHDQVPFDGMWIDMNEPSNFIRGSVDGCPNNELENPPYVPGVVGGTLQAATICASSHQFLSTHYNLHNLYGTTEAIASHRALVKARGTRPFVISRSTFAGHGRYAGHWTGDVWSSWEQLASSVPEILQFNLLGVPLVGADVCGFLGNTSEELCVRWTQLGAFYPFMRNHNSLTSLPQEPYSFSEPAQQAMRKALGLRYALLPHLYTLFHQAHVHGETVARPLFLEFPKDSSTWTVDHQMLWGEALLITPVLQPGKAEVTGYFPLGTWYDLQTVPVEALGSLPPPPAAPREPAIHSEGQWVTLPAPLDTINVHLREGYIIPLQGPGLTTTESRKQPMALAVALTKSGEARGELFWDDGESLEVLERGAYTQVIFEARNNTIVNELVHVTSEGAGLQLGKVTVLGVATAPQQVLSNGRPVSNFTYSPDTKVLDICVALLMGEQFLVSWC

SEQ ID NO: 731 - DNA, 2832 bp, synthetic construct
  misc_feature 1..2832: note = Variant of the Homo Sapiens Lysosomal alpha-glucosidase
  source 1..2832: mol_type = other DNA
atggaatggagctgggtctttctcttcttcctgtcagtaacgactggtgtccactccggacacattctgtggcatgatttttctaccgtgcctagagagctttccggttcaagtcaagtcctcgaagaaacacatccagcccatcaggttggcgcatctaggccgggccctcgggacgctcaactccacccagggagacctagggccgttcccactcagtgcgacgtgccagagaactcacgcttcgattgtgcacctgagaaggctatcacgcaagagcagtgcgaggcccgcggatgttgttacataccggctaaacaggggctgcagggtgcgcagatgggccaaccttggtgcttcttcccaccatcctatccgagttacaagctggagaatctctcccagtctgaaatgggatataccgcaacactgactcggaccaccccctccttctttcccaaagatatcttgactctgagacttgacgtaatgatggagacagaaaacaggctccactttaccattaaggaccctgccaatcgccgatacgaggtgcctctggaaacaccacacgtgcacagtagagctccatcacctctgtattctgtcgagttctccgaagagccgtttggcgttatcgtcaggaggcagctcgacgggcgagtgcttctgaacacgactgtggccccgttgttctttgcggatcagtttctgcaactgtcaacaagtctcccttctcagtacattaccgggcttgcagagcatctgtccccactcatgctgagtacttcatggaacaaaatcacactgtggaatagagaccttgctcctactccaggagccaacttgtatggttctcaccctttctacttggccctggaagatggcggatcagcgcatggcgtattcctcctgaattccaacgcaatggacgttgttcttcagccatctcctgctttgagttggagatctacaggcgggatactggacgtctacatctttctgggtccagagcctaaatccgtagtgcagcagtatcttgatgtcgtcggatacccgtttatgccaccatattggggcctggggttccacttgtgccgctggggatattcatccaccgccattacacgacaagttgttgagaatatgaccagggcacattttcctctggatgtacagtggaacgacctggactacatggatagtcgccgcgacttcaccttcaataaggatgggttcagagactttcctgctatggtccaagaacttcaccagggaggcaggaggtacatgatgatcgtagatccgggaatttcttcttctggcccagccggttcatacagaccgtatgacgaaggactgcgacgaggcgtctttatcacgaacgagactggtcagcctttgataggcaaggtttggccagggtccaccgctttcccggatttcacaaatcctgaggcactggcctggtgggaagatatggtcgccgagtttcacgaccaggtcccatttgacgggatgtggatcgacatgaacgagccatccaacttcattagaggaagtgtggatggctgtccgaataatgagctggaaaaccctccttacgtaccaggcgttgttggtgggactcttcaagctgcgacgatttgcgcatcctcccatcagttcctgtcaacccactataacttgcacaatctgtacgggacaacagaggctatcgccagtcatagggccctggtaaaagctagaggaacacgccctttcgttatctctcgctcaacttttgcaggccacggtaggtatgccggacattggaccggcgacgtctggagttcttgggaacagctggcttcctccgttccagagatattgcagtttaacctgttgggagtcccacttgtaggtgcagatgtttgtggcttcctggggaacacctcagaagaattgtgcgtaagatggactcaactgggcgccttctacccttttatgcgcaatcacaactcactgacatctttgcctcaagaaccgtactcatttagtgagccagcacagcaggccatgaggaaggctctttgcctgagatatgcacttctgccgcatctgtacacccttttccaccaggctcatgtccatggagagactgttgcacgacctctgttcttggagttcccaaaagactcttccacgtggacagtcgatcaccagatgctgtggggcgaggctctgctgattacacctgtattgcaacctggtaaggccgaagttaccgggtactttccattggggacctggtatgatctgcaaacagtcccggttgaagctcttggaagtcttccacctccacctgctgcaccaagggagcctgcgatccactctgaaggacagtgggtaactttgcctgcaccgctggacaccatcaatgtccatctgcgcgaaggctacatcataccacttcaaggtcctggactgaccactacagagtctagaaaacaaccaatggctcttgctgttgcactgactaaaagcggcgaagcaaggggtgagctgttctgggacgacggagagtcactggaggtactcgaacgaggcgcgtatacgcaggtcatttttgaggctcgcaataatacgatcgttaacgagctggtccacgtcacttcagaaggtgcaggccttcagttgggcaaggtaactgtcctgggagttgctacagcaccgcagcaggtcttgtccaacggacggcccgtaagcaactttacctatagtcctgataccaaagttctggacatctgcgttgctctgctgatgggtgagcagttcctggtatcatggtgc

SEQ ID NO: 732 - protein, 944 aa, synthetic construct
  REGION 1..944: note = Variant of the Homo Sapiens Lysosomal alpha-glucosidase
MEWSWVFLFFLSVTTGVHSGHILWHDFSTVPRELSGSSQVLEETHPAHQVGASRPGPRDAQLHPGRPRAVPTQCDVPENSRFDCAPEKAITQEQCEARGCCYIPAKQGLQGAQMGQPWCFFPPSYPSYKLENLSQSEMGYTATLTRTTPSFFPKDILTLRLDVMMETENRLHFTIKDPANRRYEVPLETPHVHSRAPSPLYSVEFSEEPFGVIVRRQLDGRVLLNTTVAPLFFADQFLQLSTSLPSQYITGLAEHLSPLMLSTSWNKITLWNRDLAPTPGANLYGSHPFYLALEDGGSAHGVFLLNSNAMDVVLQPSPALSWRSTGGILDVYIFLGPEPKSVVQQYLDVVGYPFMPPYWGLGFHLCRWGYSSTAITRQVVENMTRAHFPLDVQWNDLDYMDSRRDFTFNKDGFRDFPAMVQELHQGGRRYMMIVDPGISSSGPAGSYRPYDEGLRRGVFITNETGQPLIGKVWPGSTAFPDFTNPEALAWWEDMVAEFHDQVPFDGMWIDMNEPSNFIRGSVDGCPNNELENPPYVPGVVGGTLQAATICASSHQFLSTHYNLHNLYGTTEAIASHRALVKARGTRPFVISRSTFAGHGRYAGHWTGDVWSSWEQLASSVPEILQFNLLGVPLVGADVCGFLGNTSEELCVRWTQLGAFYPFMRNHNSLTSLPQEPYSFSEPAQQAMRKALCLRYALLPHLYTLFHQAHVHGETVARPLFLEFPKDSSTWTVDHQMLWGEALLITPVLQPGKAEVTGYFPLGTWYDLQTVPVEALGSLPPPPAAPREPAIHSEGQWVTLPAPLDTINVHLREGYIIPLQGPGLTTTESRKQPMALAVALTKSGEARGELFWDDGESLEVLERGAYTQVIFEARNNTIVNELVHVTSEGAGLQLGKVTVLGVATAPQQVLSNGRPVSNFTYSPDTKVLDICVALLMGEQFLVSWC

SEQ ID NO: 733 - DNA, 2832 bp, synthetic construct
  misc_feature 1..2832: note = Variant of the Homo Sapiens Lysosomal alpha-glucosidase
  source 1..2832: mol_type = other DNA
atggaatggagctgggtctttctcttcttcctgtcagtaacgactggtgtccactccggacacattctgtggcatgatttttctggggtgcctagagagctttccggttcaagtcaagtcctcgaagaaacacatccagcccatcaggttggcgcatctaggccgggccctcgggacgctcaactccacccagggagacctagggccgttcccactcagtgcgacgtgccagagaactcacgcttcgattgtgcacctgagaaggctatcacgcaagagcagtgcgaggcccgcggatgttgttacataccggctaaacaggggctgcagggtgcgcagatgggccaaccttggtgcttcttcccaccatcctatccgagttacaagctggagaatctctcccagtctgaaatgggatataccgcaacactgactcggaccaccccctccttctttcccaaagatatcttgactctgagacttgacgtaatgatggagacagaaaacaggctccactttaccattaaggaccctgccaatcgccgatacgaggtgcctctggaaacaccacacgtgcacagtagagctccatcacctctgtattctgtcgagttctccgaagagccgtttggcgttatcgtcaggaggcagctcgacgggcgagtgcttctgaacacgactgtggccccgttgttctttgcggatcagtttctgcaactgtcaacaagtctcccttctcagtacattaccgggcttgcagagcatctgtccccactcatgctgagtacttcatggaacaaaatcacactgtggaatagagaccttgctcctactccaggagccaacttgtatggttctcaccctttctacttggccctggaagatggcggatcagcgcatggcgtattcctcctgaattccaacgcaatggacgttgttcttcagccatctcctgctttgagttggagatctacaggcgggatactggacgtctacatctttctgggtccagagcctaaatccgtagtgcagcagtatcttgatgtcgtcggatacccgtttatgccaccatattggggcctggggttccacttgtgccgctggggatattcatccaccgccattacacgacaagttgttgagaatatgaccagggcacattttcctctggatgtacagtggaacgacctggactacatggatagtcgccgcgacttcaccttcaataaggatgggttcagagactttcctgctatggtccaagaacttcaccagggaggcaggaggtacatgatgatcgtagatccgggaatttcttcttctggcccagccggttcatacagaccgtatgacgaaggactgcgacgaggcgtctttatcacgaacgagactggtcagcctttgataggcaaggtttggccagggtccaccgctttcccggatttcacaaatcctgaggcactggcctggtgggaagatatggtcgccgagtttcacgaccaggtcccatttgacgggatgtggatcgacatgaacgagccatccaacttcattagaggaagtgtggatggctgtccgaataatgagctggaaaaccctccttacgtaccaggcgttgttggtgggactcttcaagctgcgacgatttgcgcatcctcccatcagttcctgtcaacccactataacttgcacaatctgtacgggacaacagaggctatcgccagtcatagggccctggtaaaagctagaggaacacgccctttcgttatctctcgctcaacttttgcaggccacggtaggtatgccggacattggaccggcgacgtctggagttcttgggaacagctggcttcctccgttccagagatattgcagtttaacctgttgggagtcccacttgtaggtgcagatgtttgtggcttcctggggaacacctcagaagaattgtgcgtaagatggactcaactgggcgccttctacccttttatgcgcaatcacaactcactgacatctttgcctcaagaaccgtactcatttagtgagccagcacagcaggccatgaggaaggctcttggcctgagatatgcacttctgccgcatctgtacacccttttccaccaggctcatgtccatggagagactgttgcacgacctctgttcttggagttcccaaaagactcttccacgtggacagtcgatcaccagatgctgtggggcgaggctctgctgattacacctgtattgcaacctggtaaggccgaagttaccgggtactttccattggggacctggtatgatctgcaaacagtcccggttgaagctcttggaagtcttccacctccacctgctgcaccaagggagcctgcgatccactctgaaggacagtgggtaactttgcctgcaccgctggacaccatcaatgtccatctgcgcgaaggctacatcataccacttcaaggtcctggactgaccactacagagtctagaaaacaaccaatggctcttgctgttgcactgactaaaagcggcgaagcaaggggtgagctgttctgggacgacggagagtcactggaggtactcgaacgaggcgcgtatacgcaggtcatttttgaggctcgcaataatacgatcgttaacgagctggtccacgtcacttcagaaggtgcaggccttcagttgggcaaggtaactgtcctgggagttgctacagcaccgcagcaggtcttgtccaacggacggcccgtaagcaactttacctatagtcctgataccaaagttctggacatctgcgttgctctgctgatgggtgagcagttcctggtatcatggtgc

SEQ ID NO: 734 - protein, 944 aa, synthetic construct
  REGION 1..944: note = Variant of the Homo Sapiens Lysosomal alpha-glucosidase
MEWSWVFLFFLSVTTGVHSGHILWHDFSGVPRELSGSSQVLEETHPAHQVGASRPGPRDAQLHPGRPRAVPTQCDVPENSRFDCAPEKAITQEQCEARGCCYIPAKQGLQGAQMGQPWCFFPPSYPSYKLENLSQSEMGYTATLTRTTPSFFPKDILTLRLDVMMETENRLHFTIKDPANRRYEVPLETPHVHSRAPSPLYSVEFSEEPFGVIVRRQLDGRVLLNTTVAPLFFADQFLQLSTSLPSQYITGLAEHLSPLMLSTSWNKITLWNRDLAPTPGANLYGSHPFYLALEDGGSAHGVFLLNSNAMDVVLQPSPALSWRSTGGILDVYIFLGPEPKSVVQQYLDVVGYPFMPPYWGLGFHLCRWGYSSTAITRQVVENMTRAHFPLDVQWNDLDYMDSRRDFTFNKDGFRDFPAMVQELHQGGRRYMMIVDPGISSSGPAGSYRPYDEGLRRGVFITNETGQPLIGKVWPGSTAFPDFTNPEALAWWEDMVAEFHDQVPFDGMWIDMNEPSNFIRGSVDGCPNNELENPPYVPGVVGGTLQAATICASSHQFLSTHYNLHNLYGTTEAIASHRALVKARGTRPFVISRSTFAGHGRYAGHWTGDVWSSWEQLASSVPEILQFNLLGVPLVGADVCGFLGNTSEELCVRWTQLGAFYPFMRNHNSLTSLPQEPYSFSEPAQQAMRKALGLRYALLPHLYTLFHQAHVHGETVARPLFLEFPKDSSTWTVDHQMLWGEALLITPVLQPGKAEVTGYFPLGTWYDLQTVPVEALGSLPPPPAAPREPAIHSEGQWVTLPAPLDTINVHLREGYIIPLQGPGLTTTESRKQPMALAVALTKSGEARGELFWDDGESLEVLERGAYTQVIFEARNNTIVNELVHVTSEGAGLQLGKVTVLGVATAPQQVLSNGRPVSNFTYSPDTKVLDICVALLMGEQFLVSWC

SEQ ID NO: 735 - DNA, 2832 bp, synthetic construct
  misc_feature 1..2832: note = Variant of the Homo Sapiens Lysosomal alpha-glucosidase
  source 1..2832: mol_type = other DNA
atggaatggagctgggtctttctcttcttcctgtcagtaacgactggtgtccactccggacacattctgtggcatgatttttctaccgtgcctagagagctttccggttcaagtcaagtcctcgaagaaacacatccagcccatcaggttggcgcatctaggccgggccctcgggacgctcaactccacccagggagacctagggccgttcccactcagtgcgacgtgccagagaactcacgcttcgattgtgcacctgagaaggctatcacgcaagagcagtgcgaggcccgcggatgttgttacataccggctaaacaggggctgcagggtgcgcagatgggccaaccttggtgcttcttcccaccatcctatccgagttacaagctggagaatctctcccagtctgaaatgggatataccgcaacactgactcggaccaccccctccttctttcccaaagatatcttgactctgagacttgacgtaatgatggagacagaaaacaggctccactttaccattaaggaccctgccaatcgccgatacgaggtgcctctggaaacaccacacgtgcacagtagagctccatcacctctgtattctgtcgagttctccgaagagccgtttggcgttatcgtcaggaggcagctcgacgggcgagtgcttctgaacacgactgtggccccgttgttctttgcggatcagtttctgcaactgtcaacaagtctcccttctcagtacattaccgggcttgcagagcatctgtccccactcatgctgagtacttcatggaacaaaatcacactgtggaatagagaccttgctcctactccaggagccaacttgtatggttctcaccctttctacttggccctggaagatggcggatcagcgcatggcgtattcctcctgaattccaacgcaatggacgttgttcttcagccatctcctgctttgagttggagatctacaggcgggatactggacgtctacatctttctgggtccagagcctaaatccgtagtgcagcagtatcttgatgtcgtcggatacccgtttatgccaccatattggggcctggggttccacttgtgccgctggggatattcatccaccgccattacacgacaagttgttgagaatatgaccagggcacattttcctctggatgtacagtggaacgacctggactacatggatagtcgccgcgacttcaccttcaataaggatgggttcagagactttcctgctatggtccaagaacttcaccagggaggcaggaggtacatgatgatcgtagatccgggaatttcttcttctggcccagccggttcatacagaccgtatgacgaaggactgcgacgaggcgtctttatcacgaacgagactggtcagcctttgataggcaaggtttggccagggtccaccgctttcccggatttcacaaatcctgaggcactggcctggtgggaagatatggtcgccgagtttcacgaccaggtcccatttgacgggatgtggatcgacatgaacgagccatccaacttcattagaggaagtgtggatggctgtccgaataatgagctggaaaaccctccttacgtaccaggcgttgttggtgggactcttcaagctgcgacgatttgcgcatcctcccatcagttcctgtcaacccactataacttgcacaatctgtacgggacaacagaggctatcgccagtcatagggccctggtaaaagctagaggaacacgccctttcgttatctctcgctcaacttttgcaggccacggtaggtatgccggacattggaccggcgacgtctggagttcttgggaacagctggcttcctccgttccagagatattgcagtttaacctgttgggagtcccacttgtaggtgcagatgtttgtggcttcctggggaacacctcagaagaattgtgcgtaagatggactcaactgggcgccttctacccttttatgcgcaatcacaactcactgacatctttgcctcaagaaccgtactcatttagtgagccagcacagcaggccatgaggaaggctcttggcctgagatatgcacttctgccgcatctgtacacccttttccaccaggctcatgtccatggagagactgttgcacgacctctgttcttggagttcccaaaagactcttccacgtggacagtcgatcaccagatgctgtggggcgaggctctgctgattacacctgtattgcaacctggtaaggccgaagttaccgggtactttccattggggacctggtatgatctgcaaacagtcccggttgaagctcttggaagtcttccacctccacctgctgcaccaagggagcctgcgatccactctgaaggacagtgggtaactttgcctgcaccgctggacaccatcaatgtccatctgcgcgacggctacatcataccacttcaaggtcctggactgaccactacagagtctagaaaacaaccaatggctcttgctgttgcactgactaaaagcggcgaagcaaggggtgagctgttctgggacgacggagagtcactggaggtactcgaacgaggcgcgtatacgcaggtcatttttgaggctcgcaataatacgatcgttaacgagctggtccacgtcacttcagaaggtgcaggccttcagttgggcaaggtaactgtcctgggagttgctacagcaccgcagcaggtcttgtccaacggacggcccgtaagcaactttacctatagtcctgataccaaagttctggacatctgcgttgctctgctgatgggtgagcagttcctggtatcatggtgc

SEQ ID NO: 736 - protein, 944 aa, synthetic construct
  REGION 1..944: note = Variant of the Homo Sapiens Lysosomal alpha-glucosidase
MEWSWVFLFFLSVTTGVHSGHILWHDFSTVPRELSGSSQVLEETHPAHQVGASRPGPRDAQLHPGRPRAVPTQCDVPENSRFDCAPEKAITQEQCEARGCCYIPAKQGLQGAQMGQPWCFFPPSYPSYKLENLSQSEMGYTATLTRTTPSFFPKDILTLRLDVMMETENRLHFTIKDPANRRYEVPLETPHVHSRAPSPLYSVEFSEEPFGVIVRRQLDGRVLLNTTVAPLFFADQFLQLSTSLPSQYITGLAEHLSPLMLSTSWNKITLWNRDLAPTPGANLYGSHPFYLALEDGGSAHGVFLLNSNAMDVVLQPSPALSWRSTGGILDVYIFLGPEPKSVVQQYLDVVGYPFMPPYWGLGFHLCRWGYSSTAITRQVVENMTRAHFPLDVQWNDLDYMDSRRDFTFNKDGFRDFPAMVQELHQGGRRYMMIVDPGISSSGPAGSYRPYDEGLRRGVFITNETGQPLIGKVWPGSTAFPDFTNPEALAWWEDMVAEFHDQVPFDGMWIDMNEPSNFIRGSVDGCPNNELENPPYVPGVVGGTLQAATICASSHQFLSTHYNLHNLYGTTEAIASHRALVKARGTRPFVISRSTFAGHGRYAGHWTGDVWSSWEQLASSVPEILQFNLLGVPLVGADVCGFLGNTSEELCVRWTQLGAFYPFMRNHNSLTSLPQEPYSFSEPAQQAMRKALGLRYALLPHLYTLFHQAHVHGETVARPLFLEFPKDSSTWTVDHQMLWGEALLITPVLQPGKAEVTGYFPLGTWYDLQTVPVEALGSLPPPPAAPREPAIHSEGQWVTLPAPLDTINVHLRDGYIIPLQGPGLTTTESRKQPMALAVALTKSGEARGELFWDDGESLEVLERGAYTQVIFEARNNTIVNELVHVTSEGAGLQLGKVTVLGVATAPQQVLSNGRPVSNFTYSPDTKVLDICVALLMGEQFLVSWC

SEQ ID NO: 737 - DNA, 2832 bp, synthetic construct
  misc_feature 1..2832: note = Variant of the Homo Sapiens Lysosomal alpha-glucosidase
  source 1..2832: mol_type = other DNA
atggaatggagctgggtctttctcttcttcctgtcagtaacgactggtgtccactccggacacattctgtggcatgatttttctaccgtgcctagagagctttccggttcaagtcaagtcctcgaagaaacacatccagcccatcaggttggcgcatctaggccgggccctcgggacgctcaactccacccagggagacctagggccgttcccactcagtgcgacgtgccagagaactcacgcttcgattgtgcacctgagaaggctatcacgcaagagcagtgcgaggcccgcggatgttgttacataccggctaaacaggggctgcagggtgcgcagatgggccaaccttggtgcttcttcccaccatcctatccgagttacaagctggagaatctctcccagtctgaaatgggatataccgcaacactgactcggaccaccccctccttctttcccaaagatatcttgactctgagacttgacgtaatgatggagacagaaaacaggctccactttaccattaaggaccctgccaatcgccgatacgaggtgcctctggaaacaccacacgtgcacagtagagctccatcacctctgtattctgtcgagttctccgaagagccgtttggcgttatcgtcaggaggcagctcgacgggcgagtgcttctgaacacgactgtggccccgttgttctttgcggatcagtttctgcaactgtcaacaagtctcccttctcagtacattaccgggcttgcagagcatctgtccccactcatgctgagtacttcatggaacaaaatcacactgtggaatagagaccttgctcctactccaggagccaacttgtatggttctcaccctttctacttggccctggaagatggcggatcagcgcatggcgtattcctcctgaattccaacgcaatggacgttgttcttcagccatctcctgctttgagttggagatctacaggcgggatactggacgtctacatctttctgggtccagagcctaaatccgtagtgcagcagtatcttgatgtcgtcggatacccgtttatgccaccatattggggcctggggttccacttgtgccgctggggatattcatccaccgccattacacgacaagttgttgagaatatgaccagggcacattttcctctggatgtacagtggaacgacctggactacatggatagtcgccgcgacttcaccttcaataaggatgggttcagagactttcctgctatggtccaagaacttcaccagggaggcaggaggtacatgatgatcgtagatccgggaatttcttcttctggcccagccggttcatacagaccgtatgacgaaggactgcgacgaggcgtctttatcacgaacgagactggtcagcctttgataggcaaggtttggccagggtccaccgctttcccggatttcacaaatcctgaggcactggcctggtgggaagatatggtcgccgagtttcacgaccaggtcccatttgacgggatgtggatcgacatgaacgagccatccaacttcattagaggaagtgtggatggctgtccgaataatgagctggaaaaccctccttacgtaccaggcgttgttggtgggactcttcaagctgcgacgatttgcgcatcctcccatcagttcctgtcaacccactataacttgcacaatctgtacgggacaacagaggctatcgccagtcatagggccctggtaaaagctagaggaacacgccctttcgttatctctcgctcaacttttgcaggccacggtaggtatgccggacattggaccggcgacgtctggagttcttgggaacagctggcttcctccgttccagagatattgcagtttaacctgttgggagtcccacttgtaggtgcagatgtttgtggcttcctggggaacacctcagaagaattgtgcgtaagatggactcaactgggcgccttctacccttttatgcgcaatcacaactcactgacatctttgcctcaagaaccgtactcatttagtgagccagcacagcaggccatgaggaaggctcttggcctgagatatgcacttctgccgcatctgtacacccttttccaccaggctcatgtccatggagagactgttgcacgacctctgttcttggagttcccaaaagactcttccacgtggacagtcgatcaccagatgctgtggggcgaggctctgctgattacacctgtattgcaacctggtaaggccgaagttaccgggtactttccattggggacctggtatgatctgcaaacagtcccggttgaagctcttggaagtcttccacctccacctgctgcaccaagggagcctgcgatccactctgaaggacagtgggtaactttgcctgcaccgctggacaccatcaatgtccatctgcgcgaaggctacatcataccacttcaaggtcctggactgaccactacagagtctagaaaacaaccaatggctcttgctgttgcactgactaaaagcggcgaagcaaggggtgagctgttctgggacgacggagagtcactggaggtactcgaacgaggcgcgtatacgcaggtcatttttgaggctcgcaataatacgatcgttaacgagctggtccacgtcacttcagaaggtgcaggccttcagttgggcaaggtaactgtcctgggagttgctacagcaccgcagcaggtcttgtccaacggacggcccgtaagcaactttacctatagtcctgataccaaagttctggacatctgcgtttgcctgctgatgggtgagcagttcctggtatcatggtgc

SEQ ID NO: 738 - protein, 944 aa, synthetic construct
  REGION 1..944: note = Variant of the Homo Sapiens Lysosomal alpha-glucosidase
MEWSWVFLFFLSVTTGVHSGHILWHDFSTVPRELSGSSQVLEETHPAHQVGASRPGPRDAQLHPGRPRAVPTQCDVPENSRFDCAPEKAITQEQCEARGCCYIPAKQGLQGAQMGQPWCFFPPSYPSYKLENLSQSEMGYTATLTRTTPSFFPKDILTLRLDVMMETENRLHFTIKDPANRRYEVPLETPHVHSRAPSPLYSVEFSEEPFGVIVRRQLDGRVLLNTTVAPLFFADQFLQLSTSLPSQYITGLAEHLSPLMLSTSWNKITLWNRDLAPTPGANLYGSHPFYLALEDGGSAHGVFLLNSNAMDVVLQPSPALSWRSTGGILDVYIFLGPEPKSVVQQYLDVVGYPFMPPYWGLGFHLCRWGYSSTAITRQVVENMTRAHFPLDVQWNDLDYMDSRRDFTFNKDGFRDFPAMVQELHQGGRRYMMIVDPGISSSGPAGSYRPYDEGLRRGVFITNETGQPLIGKVWPGSTAFPDFTNPEALAWWEDMVAEFHDQVPFDGMWIDMNEPSNFIRGSVDGCPNNELENPPYVPGVVGGTLQAATICASSHQFLSTHYNLHNLYGTTEAIASHRALVKARGTRPFVISRSTFAGHGRYAGHWTGDVWSSWEQLASSVPEILQFNLLGVPLVGADVCGFLGNTSEELCVRWTQLGAFYPFMRNHNSLTSLPQEPYSFSEPAQQAMRKALGLRYALLPHLYTLFHQAHVHGETVARPLFLEFPKDSSTWTVDHQMLWGEALLITPVLQPGKAEVTGYFPLGTWYDLQTVPVEALGSLPPPPAAPREPAIHSEGQWVTLPAPLDTINVHLREGYIIPLQGPGLTTTESRKQPMALAVALTKSGEARGELFWDDGESLEVLERGAYTQVIFEARNNTIVNELVHVTSEGAGLQLGKVTVLGVATAPQQVLSNGRPVSNFTYSPDTKVLDICVCLLMGEQFLVSWC

SEQ ID NO: 739 - DNA, 2832 bp, synthetic construct
  misc_feature 1..2832: note = Variant of the Homo Sapiens Lysosomal alpha-glucosidase
  source 1..2832: mol_type = other DNA
atggaatggagctgggtctttctcttcttcctgtcagtaacgactggtgtccactccggacacattctgtggcatgatttttctaccgtgcctagagagctttccggttcaagtcaagtcctcgaagaaacacatccagcccatcaggttggcgcatctaggccgggccctcgggacgctcaactccacccagggagacctagggccgttcccactcagtgcgacgtgccagagaactcacgcttcgattgtgcacctgagaaggctatcacgcaagagcagtgcgaggcccgcggatgttgttacataccggctaaacaggggctgcagggtgcgcagatgggccaaccttggtgcttcttcccaccatcctatccgagttacaagctggagaatctctcccagtctgaaatgggatataccgcaacactgactcggaccaccccctccttctttcccaaagatatcttgactctgagacttgacgtaatgatggagacagaaaacaggctccactttaccattaaggaccctgccaatcgccgatacgaggtgcctctggaaacaccacacgtgcacagtagagctccatcacctctgtattctgtcgagttctccgaagagccgtttggcgttatcgtcaggaggcagctcgacgggcgagtgcttctgaacacgactgtggccccgttgttctttgcggatcagtttctgcaactgtcaacaagtctcccttctcagtacattaccgggcttgcagagcatctgtccccactcatgctgagtacttcatggaacaaaatcacactgtggaatagagaccttgctcctactccaggagccaacttgtatggttctcaccctttctacttggccctggaagatggcggatcagcgcatggcgtattcctcctgaattccaacgcaatggacgttgttcttcagccatctcctgctttgagttggagatctacaggcgggatactggacgtctacatctttctgggtccagagcctaaatccgtagtgcagcagtatcttgatgtcgtcggatacccgtttatgccaccatattggggcctggggttccacttgtgccgctggggatattcatccaccgccattacacgacaagttgttgagaatatgaccagggcacattttcctctggatgtacagtggaacgacctggactacatggatagtcgccgcgacttcaccttcaataaggatgggttcagagactttcctgctatggtccaagaacttcaccagggaggcaggaggtacatgatgatcgtagatccgggaatttcttcttctggcccagccggttcatacagaccgtatgacgaaggactgcgacgaggcgtctttatcacgaacgagactggtcagcctttgataggcaaggtttggccagggtccaccgctttcccggatttcacaaatcctgaggcactggcctggtgggaagatatggtcgccgagtttcacgaccaggtcccatttgacgggatgtggatcgacatgaacgagccatccaacttcattagaggaagtgtggatggctgtccgaataatgagctggaaaaccctccttacgtaccaggcgttgttggtgggactcttcaagctgcgacgatttgcgcatcctcccatcagttcctgtcaacccactataacttgcacaatctgtacgggacaacagaggctatcgccagtcatagggccctggtaaaagctagaggaacacgccctttcgttatctctcgctcaacttttgcaggccacggtaggtatgccggacattggaccggcgacgtctggagttcttgggaacagctggcttcctccgttccagagatattgcagtttaacctgttgggagtcccacttgtaggtgcagatgtttgtggcttcctggggaacacctcagaagaattgtgcgtaagatggactcaactgggcgccttctacccttttatgcgcaatcacaactcactgacatctttgcctcaagaaccgtactcatttagtgagccagcacagcaggccatgaggaaggctcttggcctgagatatgcacttctgccgcatctgtacacccttttccaccaggctcatgtccatggagagactgttgcacgacctctgttcttggagttcccaaaagactcttccacgtggacagtcgatcaccagatgctgtggggcgaggctctgctgattacacctgtattgcaacctggtaaggccgaagttaccgggtactttccattggggacctggtatgatctgcaaacagtcccggttgaagctcttggaagtcttccacctccacctgctgcaccaagggagcctgcgatccactctgaaggacagtgggtaactttgcctgcaccgctggacaccatcaatgtccatctgcgcgaaggctacatcataccacttcaaggtcctggactgaccactacagagtctagaaaacaaccaatggctcttgctgttgcactgactaaaagcggcgaagcaaggggtgagctgttctgggacgacggagagtcactggaggtactcgaacgaggcgcgtatacgcaggtcatttttatagctcgcaataatacgatcgttaacgagctggtccacgtcacttcagaaggtgcaggccttcagttgggcaaggtaactgtcctgggagttgctacagcaccgcagcaggtcttgtccaacggacggcccgtaagcaactttacctatagtcctgataccaaagttctggacatctgcgttgctctgctgatgggtgagcagttcctggtatcatggtgc

SEQ ID NO: 740 - protein, 944 aa, synthetic construct
  REGION 1..944: note = Variant of the Homo Sapiens Lysosomal alpha-glucosidase
MEWSWVFLFFLSVTTGVHSGHILWHDFSTVPRELSGSSQVLEETHPAHQVGASRPGPRDAQLHPGRPRAVPTQCDVPENSRFDCAPEKAITQEQCEARGCCYIPAKQGLQGAQMGQPWCFFPPSYPSYKLENLSQSEMGYTATLTRTTPSFFPKDILTLRLDVMMETENRLHFTIKDPANRRYEVPLETPHVHSRAPSPLYSVEFSEEPFGVIVRRQLDGRVLLNTTVAPLFFADQFLQLSTSLPSQYITGLAEHLSPLMLSTSWNKITLWNRDLAPTPGANLYGSHPFYLALEDGGSAHGVFLLNSNAMDVVLQPSPALSWRSTGGILDVYIFLGPEPKSVVQQYLDVVGYPFMPPYWGLGFHLCRWGYSSTAITRQVVENMTRAHFPLDVQWNDLDYMDSRRDFTFNKDGFRDFPAMVQELHQGGRRYMMIVDPGISSSGPAGSYRPYDEGLRRGVFITNETGQPLIGKVWPGSTAFPDFTNPEALAWWEDMVAEFHDQVPFDGMWIDMNEPSNFIRGSVDGCPNNELENPPYVPGVVGGTLQAATICASSHQFLSTHYNLHNLYGTTEAIASHRALVKARGTRPFVISRSTFAGHGRYAGHWTGDVWSSWEQLASSVPEILQFNLLGVPLVGADVCGFLGNTSEELCVRWTQLGAFYPFMRNHNSLTSLPQEPYSFSEPAQQAMRKALGLRYALLPHLYTLFHQAHVHGETVARPLFLEFPKDSSTWTVDHQMLWGEALLITPVLQPGKAEVTGYFPLGTWYDLQTVPVEALGSLPPPPAAPREPAIHSEGQWVTLPAPLDTINVHLREGYIIPLQGPGLTTTESRKQPMALAVALTKSGEARGELFWDDGESLEVLERGAYTQVIFIARNNTIVNELVHVTSEGAGLQLGKVTVLGVATAPQQVLSNGRPVSNFTYSPDTKVLDICVALLMGEQFLVSWC

SEQ ID NO: 741 - DNA, 2832 bp, synthetic construct
  misc_feature 1..2832: note = Variant of the Homo Sapiens Lysosomal alpha-glucosidase
  source 1..2832: mol_type = other DNA
atggaatggagctgggtctttctcttcttcctgtcagtaacgactggtgtccactccggacacattctgtggcatgatttttctaccgtgcctagagagctttccggttcaagtcaagtcctcgaagaaacacatccagcccatcaggttggcgcatctaggccgggccctcgggacgctcaactccacccagggagacctagggccgttcccactcagtgcgacgtgccagagaactcacgcttcgattgtgcacctgagaaggctatcacgcaagagcagtgcgaggcccgcggatgttgttacataccggctaaacaggggctgcagggtgcgcagatgggccaaccttggtgcttcttcccaccatcctatccgagttacaagctggagaatctctcccagtctgaaatgggatataccgcaacactgactcggaccaccccctccttctttcccaaagatatcttgactctgagacttgacgtaatgatggagacagaaaacaggctccactttaccattaaggaccctgccaatcgccgatacgaggtgcctctggaaacaccacacgtgcacagtagagctccatcacctctgtattctgtcgagttctccgaagagccgtttggcgttatcgtcaggaggcagctcgacgggcgagtgcttctgaacacgactgtggccccgttgttctttgcggatcagtttctgcaactgtcaacaagtctcccttctcagtacattaccgggcttgcagagcatctgtccccactcatgctgagtacttcatggaacaaaatcacactgtggaatagagaccttgctcctactccaggagccaacttgtatggttctcaccctttctacttggccctggaagatggcggatcagcgcatggcgtattcctcctgaattccaacgcaatggacgttgttcttcagccatctcctgctttgagttggagatctacaggcgggatactggacgtctacatctttctgggtccagagcctaaatccgtagtgcagcagtatcttgatgtcgtcggatacccgtttatgccaccatattggggcctggggttccacttgtgccgctggggatattcatccaccgccattacacgacaagttgttgagaatatgaccagggcacattttcctctggatgtacagtggaacgacctggactacatggatagtcgccgcgacttcaccttcaataaggatgggttcagagactttcctgctatggtccaagaacttcaccagggaggcaggaggtacatgatgatcgtagatccgggaatttcttcttctggcccagccggttcatacagaccgtatgacgaaggactgcgacgaggcgtctttatcacgaacgagactggtcagcctttgataggcaaggtttggccagggtccaccgctttcccggatttcacaaatcctgaggcactggcctggtgggaagatatggtcgccgagtttcacgaccaggtcccatttgacgggatgtggatcgacatgaacgagccatccaacttcattagaggaagtgtggatggctgtccgaataatgagctggaaaaccctccttacgtaccaggcgttgttggtgggactcttcaagctgcgacgatttgcgcatcctcccatcagttcctgtcaacccactataacttgcacaatctgtacgggacaacagaggctatcgccagtcatagggccctggtaaaagctagaggaacacgccctttcgttatctctcgctcaacttttgcaggccacggtaggtatgccggacattggaccggcgacgtctggagttcttgggaacagctggcttcctccgttccagagatattgcagtttaacctgttgggagtcccacttgtaggtgcagatgtttgtggcttcctggggaacacctcagaagaattgtgcgtaagatggactcaactgggcgccttctacccttttatgcgcaatcacaactcactgacatctttgcctcaagaaccgtactcatttagtgagccagcacagcaggccatgaggaaggctctttacctgagatatgcacttctgccgcatctgtacacccttttccaccaggctcatgtccatggagagactgttgcacgacctctgttcttggagttcccaaaagactcttccacgtggacagtcgatcaccagatgctgtggggcgaggctctgctgattacacctgtattgcaacctggtaaggccgaagttaccgggtactttccattggggacctggtatgatctgcaaacagtcccggttgaagctcttggaagtcttccacctccacctgctgcaccaagggagcctgcgatccactctgaaggacagtgggtaactttgcctgcaccgctggacaccatcaatgtccatctgcgcgaaggctacatcataccacttcaaggtcctggactgaccactacagagtctagaaaacaaccaatggctcttgctgttgcactgactaaaagcggcgaagcaaggggtgagctgttctgggacgacggagagtcactggaggtactcgaacgaggcgcgtatacgcaggtcatttttgaggctcgcaataatacgatcgttaacgagctggtccacgtcacttcagaaggtgcaggccttcagttgggcaaggtaactgtcctgggagttgctacagcaccgcagcaggtcttgtccaacggacggcccgtaagcaactttacctatagtcctgataccaaagttctggacatctgcgttgctctgctgatgggtgagcagttcctggtatcatggtgc

SEQ ID NO: 742 - protein, 944 aa, synthetic construct
  REGION 1..944: note = Variant of the Homo Sapiens Lysosomal alpha-glucosidase
MEWSWVFLFFLSVTTGVHSGHILWHDFSTVPRELSGSSQVLEETHPAHQVGASRPGPRDAQLHPGRPRAVPTQCDVPENSRFDCAPEKAITQEQCEARGCCYIPAKQGLQGAQMGQPWCFFPPSYPSYKLENLSQSEMGYTATLTRTTPSFFPKDILTLRLDVMMETENRLHFTIKDPANRRYEVPLETPHVHSRAPSPLYSVEFSEEPFGVIVRRQLDGRVLLNTTVAPLFFADQFLQLSTSLPSQYITGLAEHLSPLMLSTSWNKITLWNRDLAPTPGANLYGSHPFYLALEDGGSAHGVFLLNSNAMDVVLQPSPALSWRSTGGILDVYIFLGPEPKSVVQQYLDVVGYPFMPPYWGLGFHLCRWGYSSTAITRQVVENMTRAHFPLDVQWNDLDYMDSRRDFTFNKDGFRDFPAMVQELHQGGRRYMMIVDPGISSSGPAGSYRPYDEGLRRGVFITNETGQPLIGKVWPGSTAFPDFTNPEALAWWEDMVAEFHDQVPFDGMWIDMNEPSNFIRGSVDGCPNNELENPPYVPGVVGGTLQAATICASSHQFLSTHYNLHNLYGTTEAIASHRALVKARGTRPFVISRSTFAGHGRYAGHWTGDVWSSWEQLASSVPEILQFNLLGVPLVGADVCGFLGNTSEELCVRWTQLGAFYPFMRNHNSLTSLPQEPYSFSEPAQQAMRKALYLRYALLPHLYTLFHQAHVHGETVARPLFLEFPKDSSTWTVDHQMLWGEALLITPVLQPGKAEVTGYFPLGTWYDLQTVPVEALGSLPPPPAAPREPAIHSEGQWVTLPAPLDTINVHLREGYIIPLQGPGLTTTESRKQPMALAVALTKSGEARGELFWDDGESLEVLERGAYTQVIFEARNNTIVNELVHVTSEGAGLQLGKVTVLGVATAPQQVLSNGRPVSNFTYSPDTKVLDICVALLMGEQFLVSWC

SEQ ID NO: 743 - DNA, 2832 bp, synthetic construct
  misc_feature 1..2832: note = Variant of the Homo Sapiens Lysosomal alpha-glucosidase
  source 1..2832: mol_type = other DNA
atggaatggagctgggtctttctcttcttcctgtcagtaacgactggtgtccactccggacacattctgtggcatgatttttctaccgtgcctagagagctttccggttcaagtcaagtcctcgaagaaacacatccagcccatcaggttggcgcatctaggccgggccctcgggacgctcaactccacccagggagacctagggccgttcccactcagtgcgacgtgccagagaactcacgcttcgattgtgcacctgagaaggctatcacgcaagagcagtgcgaggcccgcggatgttgttacataccggctaaacaggggctgcagggtgcgcagatgggccaaccttggtgcttcttcccaccatcctatccgagttacaagctggagaatctctcccagtctgaaatgggatataccgcaacactgactcggaccaccccctccttctttcccaaagatatcttgactctgagacttgacgtaatgatggagacagaaaacaggctccactttaccattaaggaccctgccaatcgccgatacgaggtgcctctggaaacaccacacgtgcacagtagagctccatcacctctgtattctgtcgagttctccgaagagccgtttggcgttatcgtcaggaggcagctcgacgggcgagtgcttctgaacacgactgtggccccgttgttctttgcggatcagtttctgcaactgtcaacaagtctcccttctcagtacattaccgggcttgcagagcatctgtccccactcatgctgagtacttcatggaacaaaatcacactgtggaatagagaccttgctcctactccaggagccaacttgtatggttctcaccctttctacttggccctggaagatggcggatcagcgcatggcgtattcctcctgaattccaacgcaatggacgttgttcttcagccatctcctgctttgagttggagatctacaggcgggatactggacgtctacatctttctgggtccagagcctaaatccgtagtgcagcagtatcttgatgtcgtcggatacccgtttatgccaccatattggggcctggggttccacttgtgccgctggggatattcatccaccgccattacacgacaagttgttgagaatatgaccagggcacattttcctctggatgtacagtggaacgacctggactacatggatagtcgccgcgacttcaccttcaataaggatgggttcagagactttcctgctatggtccaagaacttcaccagggaggcaggaggtacatgatgatcgtagatccgggaatttcttcttctggcccagccggttcatacagaccgtatgacgaaggactgcgacgaggcgtctttatcacgaacgagactggtcagcctttgataggcaaggtttggccagggtccaccgctttcccggatttcacaaatcctgaggcactggcctggtgggaagatatggtcgccgagtttcacgaccaggtcccatttgacgggatgtggatcgacatgaacgagccatccaacttcattagaggaagtgtggatggctgtccgaataatgagctggaaaaccctccttacgtaccaggcgttgttggtgggactcttcaagctgcgacgatttgcgcatcctcccatcagttcctgtcaacccactataacttgcacaatctgtacgggacaacagaggctatcgccagtcatagggccctggtaaaagctagaggaacacgccctttcgttatctctcgctcaacttttgcaggccacggtaggtatgccggacattggaccggcgacgtctggagttcttgggaacagctggcttcctccgttccagagatattgcagtttaacctgttgggagtcccacttgtaggtgcagatgtttgtggcttcctggggaacacctcagaagaattgtgcgtaagatggactcaactgggcgccttctacccttttatgcgcaatcacaactcactgacatctttgcctcaagaaccgtactcatttagtgagccagcacagcaggccatgaggaaggctcttggcctgagatatgcacttctgccgcatctgtacacccttttccaccaggctcatgtccatggagagactgttgcacgacctctgttcttggagttcccaaaagactcttccacgtggacagtcgatcaccagatgctgtggggcgaggctctgctgattacacctgtattgcaacagggtaaggccgaagttaccgggtactttccattggggacctggtatgatctgcaaacagtcccggttgaagctcttggaagtcttccacctccacctgctgcaccaagggagcctgcgatccactctgaaggacagtgggtaactttgcctgcaccgctggacaccatcaatgtccatctgcgcgaaggctacatcataccacttcaaggtcctggactgaccactacagagtctagaaaacaaccaatggctcttgctgttgcactgactaaaagcggcgaagcaaggggtgagctgttctgggacgacggagagtcactggaggtactcgaacgaggcgcgtatacgcaggtcatttttgaggctcgcaataatacgatcgttaacgagctggtccacgtcacttcagaaggtgcaggccttcagttgggcaaggtaactgtcctgggagttgctacagcaccgcagcaggtcttgtccaacggacggcccgtaagcaactttacctatagtcctgataccaaagttctggacatctgcgttgctctgctgatgggtgagcagttcctggtatcatggtgc

SEQ ID NO: 744 - protein, 944 aa, synthetic construct
  REGION 1..944: note = Variant of the Homo Sapiens Lysosomal alpha-glucosidase
MEWSWVFLFFLSVTTGVHSGHILWHDFSTVPRELSGSSQVLEETHPAHQVGASRPGPRDAQLHPGRPRAVPTQCDVPENSRFDCAPEKAITQEQCEARGCCYIPAKQGLQGAQMGQPWCFFPPSYPSYKLENLSQSEMGYTATLTRTTPSFFPKDILTLRLDVMMETENRLHFTIKDPANRRYEVPLETPHVHSRAPSPLYSVEFSEEPFGVIVRRQLDGRVLLNTTVAPLFFADQFLQLSTSLPSQYITGLAEHLSPLMLSTSWNKITLWNRDLAPTPGANLYGSHPFYLALEDGGSAHGVFLLNSNAMDVVLQPSPALSWRSTGGILDVYIFLGPEPKSVVQQYLDVVGYPFMPPYWGLGFHLCRWGYSSTAITRQVVENMTRAHFPLDVQWNDLDYMDSRRDFTFNKDGFRDFPAMVQELHQGGRRYMMIVDPGISSSGPAGSYRPYDEGLRRGVFITNETGQPLIGKVWPGSTAFPDFTNPEALAWWEDMVAEFHDQVPFDGMWIDMNEPSNFIRGSVDGCPNNELENPPYVPGVVGGTLQAATICASSHQFLSTHYNLHNLYGTTEAIASHRALVKARGTRPFVISRSTFAGHGRYAGHWTGDVWSSWEQLASSVPEILQFNLLGVPLVGADVCGFLGNTSEELCVRWTQLGAFYPFMRNHNSLTSLPQEPYSFSEPAQQAMRKALGLRYALLPHLYTLFHQAHVHGETVARPLFLEFPKDSSTWTVDHQMLWGEALLITPVLQQGKAEVTGYFPLGTWYDLQTVPVEALGSLPPPPAAPREPAIHSEGQWVTLPAPLDTINVHLREGYIIPLQGPGLTTTESRKQPMALAVALTKSGEARGELFWDDGESLEVLERGAYTQVIFEARNNTIVNELVHVTSEGAGLQLGKVTVLGVATAPQQVLSNGRPVSNFTYSPDTKVLDICVALLMGEQFLVSWC

SEQ ID NO: 745 - DNA, 2832 bp, synthetic construct
  misc_feature 1..2832: note = Variant of the Homo Sapiens Lysosomal alpha-glucosidase
  source 1..2832: mol_type = other DNA
atggaatggagctgggtctttctcttcttcctgtcagtaacgactggtgtccactccggacacattctgtggcatgatttttctaccgtgcctagagagctttccggttcaagtcaagtcctcgaagaaacacatccagcccatcaggttggcgcatctaggccgggccctcgggacgctcaactccacccagggagacctagggccgttcccactcagtgcgacgtgccagagaactcacgcttcgattgtgcacctgagaaggctatcacgcaagagcagtgcgaggcccgcggatgttgttacataccggctaaacaggggctgcagggtgcgcagatgggccaaccttggtgcttcttcccaccatcctatccgagttacaagctggagaatctctcccagtctgaaatgggatataccgcaacactgactcggaccaccccctccttctttcccaaagatatcttgactctgagacttgacgtaatgatggagacagaaaacaggctccactttaccattaaggaccctgccaatcgccgatacgaggtgcctctggaaacaccacacgtgcacagtagagctccatcacctctgtattctgtcgagttctccgaagagccgtttggcgttatcgtcaggaggcagctcgacgggcgagtgcttctgaacacgactgtggccccgttgttctttgcggatcagtttctgcaactgtcaacaagtctcccttctcagtacattaccgggcttgcagagcatctgtccccactcatgctgagtacttcatggaacaaaatcacactgtggaatagagaccttgctcctactccaggagccaacttgtatggttctcaccctttctacttggccctggaagatggcggatcagcgcatggcgtattcctcctgaattccaacgcaatggacgttgttcttcagccatctcctgctttgagttggagatctacaggcgggatactggacgtctacatctttctgggtccagagcctaaatccgtagtgcagcagtatcttgatgtcgtcggatacccgtttatgccaccatattggggcctggggttccacttgtgccgctggggatattcatccaccgccattacacgacaagttgttgagaatatgaccagggcacattttcctctggatgtacagtggaacgacctggactacatggatagtcgccgcgacttcaccttcaataaggatgggttcagagactttcctgctatggtccaagaacttcaccagggaggcaggaggtacatgatgatcgtagatccgggaatttcttcttctggcccagccggttcatacagaccgtatgacgaaggactgcgacgaggcgtctttatcacgaacgagactggtcagcctttgataggcaaggtttggccagggtccaccgctttcccggatttcacaaatcctgaggcactggcctggtgggaagatatggtcgccgagtttcacgaccaggtcccatttgacgggatgtggatcgacatgaacgagccatccaacttcattagaggaagtgtggatggctgtccgaataatgagctggaaaaccctccttacgtaccaggcgttgttggtgggactcttcaagctgcgacgatttgcgcatcctcccatcagttcctgtcaacccactataacttgcacaatctgtacgggacaacagaggctatcgccagtcatagggccctggtaaaagctagaggaacacgccctttcgttatctctcgctcaacttttgcaggccacggtaggtatgccggacattggaccggcgacgtctggagttcttgggaacagctggcttcctccgttccagagatattgcagtttaacctgttgggagtcccacttgtaggtgcagatgtttgtggcttcctggggaacacctcagaagaattgtgcgtaagatggactcaactgggcgccttctacccttttatgcgcaatcacaactcactgacatctttgcctcaagaaccgtactcatttagtgagccagcacagcaggccatgaggaaggctcttggcctgagatatgcacttctgccgcatctgtacacccttttccaccaggctcatgtccatggagagactgttgcacgacctctgttcttggagttcccaaaagactcttccacgtggacagtcgatcaccagatgctgtggggcgaggctctgctgattacacctgtattgcaacctggtaaggccgaagttaccgggtactttccattggggacctggtatgatctgcaaacagtcccggttgaagctcttggaagtcttccacctccacctgctgcaccaagggagcctgcgatccactctgaaggacagtgggtaactttgcctgcaccgctggacaccatcaatgtccatctgcgcgaaggctacatcataccacttcaaggtcctggactgaccactacagagtctagacatcaaccaatggctcttgctgttgcactgactaaaagcggcgaagcaaggggtgagctgttctgggacgacggagagtcactggaggtactcgaacgaggcgcgtatacgcaggtcatttttgaggctcgcaataatacgatcgttaacgagctggtccacgtcacttcagaaggtgcaggccttcagttgggcaaggtaactgtcctgggagttgctacagcaccgcagcaggtcttgtccaacggacggcccgtaagcaactttacctatagtcctgataccaaagttctggacatctgcgttgctctgctgatgggtgagcagttcctggtatcatggtgc

SEQ ID NO: 746 - protein, 944 aa, synthetic construct
  REGION 1..944: note = Variant of the Homo Sapiens Lysosomal alpha-glucosidase
MEWSWVFLFFLSVTTGVHSGHILWHDFSTVPRELSGSSQVLEETHPAHQVGASRPGPRDAQLHPGRPRAVPTQCDVPENSRFDCAPEKAITQEQCEARGCCYIPAKQGLQGAQMGQPWCFFPPSYPSYKLENLSQSEMGYTATLTRTTPSFFPKDILTLRLDVMMETENRLHFTIKDPANRRYEVPLETPHVHSRAPSPLYSVEFSEEPFGVIVRRQLDGRVLLNTTVAPLFFADQFLQLSTSLPSQYITGLAEHLSPLMLSTSWNKITLWNRDLAPTPGANLYGSHPFYLALEDGGSAHGVFLLNSNAMDVVLQPSPALSWRSTGGILDVYIFLGPEPKSVVQQYLDVVGYPFMPPYWGLGFHLCRWGYSSTAITRQVVENMTRAHFPLDVQWNDLDYMDSRRDFTFNKDGFRDFPAMVQELHQGGRRYMMIVDPGISSSGPAGSYRPYDEGLRRGVFITNETGQPLIGKVWPGSTAFPDFTNPEALAWWEDMVAEFHDQVPFDGMWIDMNEPSNFIRGSVDGCPNNELENPPYVPGVVGGTLQAATICASSHQFLSTHYNLHNLYGTTEAIASHRALVKARGTRPFVISRSTFAGHGRYAGHWTGDVWSSWEQLASSVPEILQFNLLGVPLVGADVCGFLGNTSEELCVRWTQLGAFYPFMRNHNSLTSLPQEPYSFSEPAQQAMRKALGLRYALLPHLYTLFHQAHVHGETVARPLFLEFPKDSSTWTVDHQMLWGEALLITPVLQPGKAEVTGYFPLGTWYDLQTVPVEALGSLPPPPAAPREPAIHSEGQWVTLPAPLDTINVHLREGYIIPLQGPGLTTTESRHQPMALAVALTKSGEARGELFWDDGESLEVLERGAYTQVIFEARNNTIVNELVHVTSEGAGLQLGKVTVLGVATAPQQVLSNGRPVSNFTYSPDTKVLDICVALLMGEQFLVSWC

SEQ ID NO: 747 - DNA, 2832 bp, synthetic construct
  misc_feature 1..2832: note = Variant of the Homo Sapiens Lysosomal alpha-glucosidase
  source 1..2832: mol_type = other DNA
atggaatggagctgggtctttctcttcttcctgtcagtaacgactggtgtccactccggacacattctgtggcatgatttttctaccgtgcctagagagctttccggttcaagtcaagtcctcgaagaaacacatccagcccatcaggttggcgcatctaggccgggccctcgggacgctcaactccacccagggagacctagggccgttcccactcagtgcgacgtgccagagaactcacgcttcgattgtgcacctgagaaggctatcacgcaagagcagtgcgaggcccgcggatgttgttacataccggctaaacaggggctgcagggtgcgcagatgggccaaccttggtgcttcttcccaccatcctatccgagttacaagctggagaatctctcccagtctgaaatgggatataccgcaacactgactcggaccaccccctccttctttcccaaagatatcttgactctgagacttgacgtaatgatggagacagaaaacaggctccactttaccattaaggaccctgccaatcgccgatacgaggtgcctctggaaacaccacacgtgcacagtagagctccatcacctctgtattctgtcgagttctccgaagagccgtttggcgttatcgtcaggaggcagctcgacgggcgagtgcttctgaacacgactgtggccccgttgttctttgcggatcagtttctgcaactgtcaacaagtctcccttctcagtacattaccgggcttgcagagcatctgtccccactcatgctgagtacttcatggaacaaaatcacactgtggaatagagaccttgctcctactccaggagccaacttgtatggttctcaccctttctacttggccctggaagatggcggatcagcgcatggcgtattcctcctgaattccaacgcaatggacgttgttcttcagccatctcctgctttgagttggagatctacaggcgggatactggacgtctacatctttctgggtccagagcctaaatccgtagtgcagcagtatcttgatgtcgtcggatacccgtttatgccaccatattggggcctggggttccacttgtgccgctggggatattcatccaccgccattacacgacaagttgttgagaatatgaccagggcacattttcctctggatgtacagtggaacgacctggactacatggatagtcgccgcgacttcaccttcaataaggatgggttcagagactttcctgctatggtccaagaacttcaccagggaggcaggaggtacatgatgatcgtagatccgggaatttcttcttctggcccagccggttcatacagaccgtatgacgaaggactgcgacgaggcgtctttatcacgaacgagactggtcagcctttgataggcaaggtttggccagggtccaccgctttcccggatttcacaaatcctgaggcactggcctggtgggaagatatggtcgccgagtttcacgaccaggtcccatttgacgggatgtggatcgacatgaacgagccatccaacttcattagaggaagtgtggatggctgtccgaataatgagctggaaaaccctccttacgtaccaggcgttgttggtgggactcttcaagctgcgacgatttgcgcatcctcccatcagttcctgtcaacccactataacttgcacaatctgtacgggacaacagaggctatcgccagtcatagggccctggtaaaagctagaggaacacgccctttcgttatctctcgctcaacttttgcaggccacggtaggtatgccggacattggaccggcgacgtctggagttcttgggaacagctggcttcctccgttccagagatattgcagtttaacctgttgggagtcccacttgtaggtgcagatgtttgtggcttcctggggaacacctcagaagaattgtgcgtaagatggactcaactgggcgccttctacccttttatgcgcaatcacaactcactgacatctttgcctcaagaaccgtactcatttagtgagccagcacagcaggccatgaggaaggctcttggcctgagatatgcacttctgccgcatctgtacacccttttccaccaggctcatgtccatggagagactgttgcacgacctctgttcttggagttcccaaaagactcttccacgtggacagtcgatcaccagatgctgtggggcgaggctctgctgattacacctgtattgcaacctggtaaggccgaagttaccgggtactttccattggggacctggtatgatctgcaaacagtcccggttgaagctcttggaagtcttccacctccacctgctgcaccaagggagcctgcgatccactctgaaggacagtgggtaactttgcctgcaccgctggacaccatcaatgtccatctgcgcgaaggctacatcataccacttcaaggtcctggactgaccactacagagtctagaaaacaaccaatggctcttgctgttgcactgactaaatgcggcgaagcaaggggtgagctgttctgggacgacggagagtcactggaggtactcgaacgaggcgcgtatacgcaggtcatttttgaggctcgcaataatacgatcgttaacgagctggtccacgtcacttcagaaggtgcaggccttcagttgggcaaggtaactgtcctgggagttgctacagcaccgcagcaggtcttgtccaacggacggcccgtaagcaactttacctatagtcctgataccaaagttctggacatctgcgttgctctgctgatgggtgagcagttcctggtatcatggtgc

SEQ ID NO: 748 - protein, 944 aa, synthetic construct
  REGION 1..944: note = Variant of the Homo Sapiens Lysosomal alpha-glucosidase
MEWSWVFLFFLSVTTGVHSGHILWHDFSTVPRELSGSSQVLEETHPAHQVGASRPGPRDAQLHPGRPRAVPTQCDVPENSRFDCAPEKAITQEQCEARGCCYIPAKQGLQGAQMGQPWCFFPPSYPSYKLENLSQSEMGYTATLTRTTPSFFPKDILTLRLDVMMETENRLHFTIKDPANRRYEVPLETPHVHSRAPSPLYSVEFSEEPFGVIVRRQLDGRVLLNTTVAPLFFADQFLQLSTSLPSQYITGLAEHLSPLMLSTSWNKITLWNRDLAPTPGANLYGSHPFYLALEDGGSAHGVFLLNSNAMDVVLQPSPALSWRSTGGILDVYIFLGPEPKSVVQQYLDVVGYPFMPPYWGLGFHLCRWGYSSTAITRQVVENMTRAHFPLDVQWNDLDYMDSRRDFTFNKDGFRDFPAMVQELHQGGRRYMMIVDPGISSSGPAGSYRPYDEGLRRGVFITNETGQPLIGKVWPGSTAFPDFTNPEALAWWEDMVAEFHDQVPFDGMWIDMNEPSNFIRGSVDGCPNNELENPPYVPGVVGGTLQAATICASSHQFLSTHYNLHNLYGTTEAIASHRALVKARGTRPFVISRSTFAGHGRYAGHWTGDVWSSWEQLASSVPEILQFNLLGVPLVGADVCGFLGNTSEELCVRWTQLGAFYPFMRNHNSLTSLPQEPYSFSEPAQQAMRKALGLRYALLPHLYTLFHQAHVHGETVARPLFLEFPKDSSTWTVDHQMLWGEALLITPVLQPGKAEVTGYFPLGTWYDLQTVPVEALGSLPPPPAAPREPAIHSEGQWVTLPAPLDTINVHLREGYIIPLQGPGLTTTESRKQPMALAVALTKCGEARGELFWDDGESLEVLERGAYTQVIFEARNNTIVNELVHVTSEGAGLQLGKVTVLGVATAPQQVLSNGRPVSNFTYSPDTKVLDICVALLMGEQFLVSWC

SEQ ID NO: 749 - DNA, 2832 bp, synthetic construct
  misc_feature 1..2832: note = Variant of the Homo Sapiens Lysosomal alpha-glucosidase
  source 1..2832: mol_type = other DNA
atggaatggagctgggtctttctcttcttcctgtcagtaacgactggtgtccactccggacacattctgtggcatgatttttctaccgtgcctagagagctttccggttcaagtcaagtcctcgaagaaacacatccagcccatcaggttggcgcatctaggccgggccctcgggacgctcaactccacccagggagacctagggccgttcccactcagtgcgacgtgccagagaactcacgcttcgattgtgcacctgagaaggctatcacgcaagagcagtgcgaggcccgcggatgttgttacataccggctaaacaggggctgcagggtgcgcagatgggccaaccttggtgcttcttcccaccatcctatccgagttacaagctggagaatctctcccagtctgaaatgggatataccgcaacactgactcggaccaccccctccttctttcccaaagatatcttgactctgagacttgacgtaatgatggagacagaaaacaggctccactttaccattaaggaccctgccaatcgccgatacgaggtgcctctggaaacaccacacgtgcacagtagagctccatcacctctgtattctgtcgagttctccgaagagccgtttggcgttatcgtcaggaggcagctcgacgggcgagtgcttctgaacacgactgtggccccgttgttctttgcggatcagtttctgcaactgtcaacaagtctcccttctcagtacattaccgggcttgcagagcatctgtccccactcatgctgagtacttcatggaacaaaatcacactgtggaatagagaccttgctcctactccaggagccaacttgtatggttctcaccctttctacttggccctggaagatggcggatcagcgcatggcgtattcctcctgaattccaacgcaatggacgttgttcttcagccatctcctgctttgagttggagatctacaggcgggatactggacgtctacatctttctgggtccagagcctaaatccgtagtgcagcagtatcttgatgtcgtcggatacccgtttatgccaccatattggggcctggggttccacttgtgccgctggggatattcatccaccgccattacacgacaagttgttgagaatatgaccagggcacattttcctctggatgtacagtggaacgacctggactacatggatagtcgccgcgacttcaccttcaataaggatgggttcagagactttcctgctatggtccaagaacttcaccagggaggcaggaggtacatgatgatcgtagatccgggaatttcttcttctggcccagccggttcatacagaccgtatgacgaaggactgcgacgaggcgtctttatcacgaacgagactggtcagcctttgataggcaaggtttggccagggtccaccgctttcccggatttcacaaatcctgaggcactggcctggtgggaagatatggtcgccgagtttcacgaccaggtcccatttgacgggatgtggatcgacatgaacgagccatccaacttcattagaggaagtgtggatggctgtccgaataatgagctggaaaaccctccttacgtaccaggcgttgttggtgggactcttcaagctgcgacgatttgcgcatcctcccatcagttcctgtcaacccactataacttgcacaatctgtacgggacaacagaggctatcgccagtcatagggccctggtaaaagctagaggaacacgccctttcgttatctctcgctcaacttttgcaggccacggtaggtatgccggacattggaccggcgacgtctggagttcttgggaacagctggcttcctccgttccagagatattgcagtttaacctgttgggagtcccacttgtaggtgcagatgtttgtggcttcctggggaacacctcagaagaattgtgcgtaagatggactcaactgggcgccttctacccttttatgcgcaatcacaactcactgacatctttgcctcaagaaccgtactcatttagtgagccagcacagcaggccatgaggaaggctcttggcctgagatatgcacttctgccgcatctgtacacccttttccaccaggctcatgtccatggagagactgttgcacgacctctgttcttggagttcccaaaagactcttccacgtggacagtcgatcaccagatgctgtggggcgaggctctgctgattacacctgtattgcaacctggtaaggccgaagttaccgggtactttccattggggacctggtatgatctgcaaacagtcccggttgaagctcttggaagtcttccacctccacctgctgcaccaagggagcctgcgatccactctgaaggacagtgggtaactttgcctgcaccgctggacaccatcaatgtccatctgcgcgaaggctacatcataccacttcaaggtcctggactgaccactacagagtctagaaaacaaccaatggctcttgctgttgcactgactaaaagcggcgaagcaaggggtgagctgttctgggacgacggagagtcactggaggtactcgaacgaggcgcgtatacgcaggtcatttttagcgctcgcaataatacgatcgttaacgagctggtccacgtcacttcagaaggtgcaggccttcagttgggcaaggtaactgtcctgggagttgctacagcaccgcagcaggtcttgtccaacggacggcccgtaagcaactttacctatagtcctgataccaaagttctggacatctgcgttgctctgctgatgggtgagcagttcctggtatcatggtgc

SEQ ID NO: 750 - protein, 944 aa, synthetic construct
  REGION 1..944: note = Variant of the Homo Sapiens Lysosomal alpha-glucosidase
MEWSWVFLFFLSVTTGVHSGHILWHDFSTVPRELSGSSQVLEETHPAHQVGASRPGPRDAQLHPGRPRAVPTQCDVPENSRFDCAPEKAITQEQCEARGCCYIPAKQGLQGAQMGQPWCFFPPSYPSYKLENLSQSEMGYTATLTRTTPSFFPKDILTLRLDVMMETENRLHFTIKDPANRRYEVPLETPHVHSRAPSPLYSVEFSEEPFGVIVRRQLDGRVLLNTTVAPLFFADQFLQLSTSLPSQYITGLAEHLSPLMLSTSWNKITLWNRDLAPTPGANLYGSHPFYLALEDGGSAHGVFLLNSNAMDVVLQPSPALSWRSTGGILDVYIFLGPEPKSVVQQYLDVVGYPFMPPYWGLGFHLCRWGYSSTAITRQVVENMTRAHFPLDVQWNDLDYMDSRRDFTFNKDGFRDFPAMVQELHQGGRRYMMIVDPGISSSGPAGSYRPYDEGLRRGVFITNETGQPLIGKVWPGSTAFPDFTNPEALAWWEDMVAEFHDQVPFDGMWIDMNEPSNFIRGSVDGCPNNELENPPYVPGVVGGTLQAATICASSHQFLSTHYNLHNLYGTTEAIASHRALVKARGTRPFVISRSTFAGHGRYAGHWTGDVWSSWEQLASSVPEILQFNLLGVPLVGADVCGFLGNTSEELCVRWTQLGAFYPFMRNHNSLTSLPQEPYSFSEPAQQAMRKALGLRYALLPHLYTLFHQAHVHGETVARPLFLEFPKDSSTWTVDHQMLWGEALLITPVLQPGKAEVTGYFPLGTWYDLQTVPVEALGSLPPPPAAPREPAIHSEGQWVTLPAPLDTINVHLREGYIIPLQGPGLTTTESRKQPMALAVALTKSGEARGELFWDDGESLEVLERGAYTQVIFSARNNTIVNELVHVTSEGAGLQLGKVTVLGVATAPQQVLSNGRPVSNFTYSPDTKVLDICVALLMGEQFLVSWC

SEQ ID NO: 751 - DNA, 2832 bp, synthetic construct
  misc_feature 1..2832: note = Variant of the Homo Sapiens Lysosomal alpha-glucosidase
  source 1..2832: mol_type = other DNA
atggaatggagctgggtctttctcttcttcctgtcagtaacgactggtgtccactccggacacattctgtggcatgatttttctaccgtgcctagagagctttccggttcaagtcaagtcctcgaagaaacacatccagcccatcaggttggcgcatctaggccgggccctcgggacgctcaactccacccagggagacctagggccgttcccactcagtgcgacgtgccagagaactcacgcttcgattgtgcacctgagaaggctatcacgcaagagcagtgcgaggcccgcggatgttgttacataccggctaaacaggggctgcagggtgcgcagatgggccaaccttggtgcttcttcccaccatcctatccgagttacaagctggagaatctctcccagtctgaaatgggatataccgcaacactgactcggaccaccccctccttctttcccaaagatatcttgactctgagacttgacgtaatgatggagacagaaaacaggctccactttaccattaaggaccctgccaatcgccgatacgaggtgcctctggaaacaccacacgtgcacagtagagctccatcacctctgtattctgtcgagttctccgaagagccgtttggcgttatcgtcaggaggcagctcgacgggcgagtgcttctgaacacgactgtggccccgttgttctttgcggatcagtttctgcaactgtcaacaagtctcccttctcagtacattaccgggcttgcagagcatctgtccccactcatgctgagtacttcatggaacaaaatcacactgtggaatagagaccttgctcctactccaggagccaacttgtatggttctcaccctttctacttggccctggaagatggcggatcagcgcatggcgtattcctcctgaattccaacgcaatggacgttgttcttcagccatctcctgctttgagttggagatctacaggcgggatactggacgtctacatctttctgggtccagagcctaaatccgtagtgcagcagtatcttgatgtcgtcggatacccgtttatgccaccatattggggcctggggttccacttgtgccgctggggatattcatccaccgccattacacgacaagttgttgagaatatgaccagggcacattttcctctggatgtacagtggaacgacctggactacatggatagtcgccgcgacttcaccttcaataaggatgggttcagagactttcctgctatggtccaagaacttcaccagggaggcaggaggtacatgatgatcgtagatccgggaatttcttcttctggcccagccggttcatacagaccgtatgacgaaggactgcgacgaggcgtctttatcacgaacgagactggtcagcctttgataggcaaggtttggccagggtccaccgctttcccggatttcacaaatcctgaggcactggcctggtgggaagatatggtcgccgagtttcacgaccaggtcccatttgacgggatgtggatcgacatgaacgagccatccaacttcattagaggaagtgtggatggctgtccgaataatgagctggaaaaccctccttacgtaccaggcgttgttggtgggactcttcaagctgcgacgatttgcgcatcctcccatcagttcctgtcaacccactataacttgcacaatctgtacgggacaacagaggctatcgccagtcatagggccctggtaaaagctagaggaacacgccctttcgttatctctcgctcaacttttgcaggccacggtaggtatgccggacattggaccggcgacgtctggagttcttgggaacagctggcttcctccgttccagagatattgcagtttaacctgttgggagtcccacttgtaggtgcagatgtttgtggcttcctggggaacacctcagaagaattgtgcgtaagatggactcaactgggcgccttctacccttttatgcgcaatcacaactcactgacatctttgcctcaagaaccgtactcatttagtgagccagcacagcaggccatgaggaaggctcttggcctgagatatgcacttctgccgcatctgtacacccttttccaccaggctcatgtccatggagagactgttgcacgacctctgttcttggagttcccaaaagactcttccacgtggacagtcgatcaccagatgctgtggggcgaggctctgctgattacacctgtattgcaacctggtaaggccgaagttaccgggtactttccattggggacctggtatgatctgcaaacagtcccggttgaagctcttggaagtcttccacctccacctgctgcaccaagggagcctgcgatccactctgaaggacagtgggtaactttgcctgcaccgctggacaccatcaatgtccatctgcgcgaaggctacatcataccacttcaaggtcctggactgaccactacagagtctagaaaacaaccaatggctcttgctgttgcactgactaaaagcggcgaagcaaggggtgagctgttctgggacgacggagagtcactggaggtactcgaacgaggcgcgtatacgcaggtcattttttgcgctcgcaataatacgatcgttaacgagctggtccacgtcacttcagaaggtgcaggccttcagttgggcaaggtaactgtcctgggagttgctacagcaccgcagcaggtcttgtccaacggacggcccgtaagcaactttacctatagtcctgataccaaagttctggacatctgcgttgctctgctgatgggtgagcagttcctggtatcatggtgc

SEQ ID NO: 752 - protein, 944 aa, synthetic construct
  REGION 1..944: note = Variant of the Homo Sapiens Lysosomal alpha-glucosidase
MEWSWVFLFFLSVTTGVHSGHILWHDFSTVPRELSGSSQVLEETHPAHQVGASRPGPRDAQLHPGRPRAVPTQCDVPENSRFDCAPEKAITQEQCEARGCCYIPAKQGLQGAQMGQPWCFFPPSYPSYKLENLSQSEMGYTATLTRTTPSFFPKDILTLRLDVMMETENRLHFTIKDPANRRYEVPLETPHVHSRAPSPLYSVEFSEEPFGVIVRRQLDGRVLLNTTVAPLFFADQFLQLSTSLPSQYITGLAEHLSPLMLSTSWNKITLWNRDLAPTPGANLYGSHPFYLALEDGGSAHGVFLLNSNAMDVVLQPSPALSWRSTGGILDVYIFLGPEPKSVVQQYLDVVGYPFMPPYWGLGFHLCRWGYSSTAITRQVVENMTRAHFPLDVQWNDLDYMDSRRDFTFNKDGFRDFPAMVQELHQGGRRYMMIVDPGISSSGPAGSYRPYDEGLRRGVFITNETGQPLIGKVWPGSTAFPDFTNPEALAWWEDMVAEFHDQVPFDGMWIDMNEPSNFIRGSVDGCPNNELENPPYVPGVVGGTLQAATICASSHQFLSTHYNLHNLYGTTEAIASHRALVKARGTRPFVISRSTFAGHGRYAGHWTGDVWSSWEQLASSVPEILQFNLLGVPLVGADVCGFLGNTSEELCVRWTQLGAFYPFMRNHNSLTSLPQEPYSFSEPAQQAMRKALGLRYALLPHLYTLFHQAHVHGETVARPLFLEFPKDSSTWTVDHQMLWGEALLITPVLQPGKAEVTGYFPLGTWYDLQTVPVEALGSLPPPPAAPREPAIHSEGQWVTLPAPLDTINVHLREGYIIPLQGPGLTTTESRKQPMALAVALTKSGEARGELFWDDGESLEVLERGAYTQVIFCARNNTIVNELVHVTSEGAGLQLGKVTVLGVATAPQQVLSNGRPVSNFTYSPDTKVLDICVALLMGEQFLVSWC

SEQ ID NO: 753 - DNA, 2832 bp, synthetic construct
  misc_feature 1..2832: note = Variant of the Homo Sapiens Lysosomal alpha-glucosidase
  source 1..2832: mol_type = other DNA
atggaatggagctgggtctttctcttcttcctgtcagtaacgactggtgtccactccggacacattctgtggcatgatttttctaccgtgcctagagagctttccggttcaagtcaagtcctcgaagaaacacatccagcccatcaggttggcgcatctaggccgggccctcgggacgctcaactccacccagggagacctagggccgttcccactcagtgcgacgtgccagagaactcacgcttcgattgtgcacctgagaaggctatcacgcaagagcagtgcgaggcccgcggatgttgttacataccggctaaacaggggctgcagggtgcgcagatgggccaaccttggtgcttcttcccaccatcctatccgagttacaagctggagaatctctcccagtctgaaatgggatataccgcaacactgactcggaccaccccctccttctttcccaaagatatcttgactctgagacttgacgtaatgatggagacagaaaacaggctccactttaccattaaggaccctgccaatcgccgatacgaggtgcctctggaaacaccacacgtgcacagtagagctccatcacctctgtattctgtcgagttctccgaagagccgtttggcgttatcgtcaggaggcagctcgacgggcgagtgcttctgaacacgactgtggccccgttgttctttgcggatcagtttctgcaactgtcaacaagtctcccttctcagtacattaccgggcttgcagagcatctgtccccactcatgctgagtacttcatggaacaaaatcacactgtggaatagagaccttgctcctactccaggagccaacttgtatggttctcaccctttctacttggccctggaagatggcggatcagcgcatggcgtattcctcctgaattccaacgcaatggacgttgttcttcagccatctcctgctttgagttggagatctacaggcgggatactggacgtctacatctttctgggtccagagcctaaatccgtagtgcagcagtatcttgatgtcgtcggatacccgtttatgccaccatattggggcctggggttccacttgtgccgctggggatattcatccaccgccattacacgacaagttgttgagaatatgaccagggcacattttcctctggatgtacagtggaacgacctggactacatggatagtcgccgcgacttcaccttcaataaggatgggttcagagactttcctgctatggtccaagaacttcaccagggaggcaggaggtacatgatgatcgtagatccgggaatttcttcttctggcccagccggttcatacagaccgtatgacgaaggactgcgacgaggcgtctttatcacgaacgagactggtcagcctttgataggcaaggtttggccagggtccaccgctttcccggatttcacaaatcctgaggcactggcctggtgggaagatatggtcgccgagtttcacgaccaggtcccatttgacgggatgtggatcgacatgaacgagccatccaacttcattagaggaagtgtggatggctgtccgaataatgagctggaaaaccctccttacgtaccaggcgttgttggtgggactcttcaagctgcgacgatttgcgcatcctcccatcagttcctgtcaacccactataacttgcacaatctgtacgggacaacagaggctatcgccagtcatagggccctggtaaaagctagaggaacacgccctttcgttatctctcgctcaacttttgcaggccacggtaggtatgccggacattggaccggcgacgtctggagttcttgggaacagctggcttcctccgttccagagatattgcagtttaacctgttgggagtcccacttgtaggtgcagatgtttgtggcttcctggggaacacctcagaagaattgtgcgtaagatggactcaactgggcgccttctacccttttatgcgcaatcacaactcactgacatctttgcctcaagaaccgtactcatttagtgagccagcacagcaggccatgaggaaggctcttggcctgagatatgcacttctgccgcatctgtacacccttttccaccaggctcatgtccatggagagactgttgcacgacctctgttcttggagttcccaaaagactcttccacgtggacagtcgatcaccagatgctgtggggcgaggctctgctgattacacctgtattgcaacctggtaaggccgaagttaccgggtactttccattggggacctggtatgatctgcaaacagtcccggttgaagctcttggaagtcttccacctccacctgctgcaccaagggagcctgcgatccactctgaaggacagtgggtaactttgcctgcaccgctggacaccatcaatgtccatctgcgcgaaggctacatcataccacttcaaggtcctggactgaccactacagagtctagaaaacaaccaatggctcttgctgttgcactgactaaaagcggcgaagcaaggggtgagctgttctgggacgacggagagtcactggaggtactcgaacgaggcgcgtatacgcaggtcatttttgaggctcgcaataatacgatcgttaacgagctggtccacgtcacttcagaaggtgcaggccttcagttgggcaaggtaactgtcctgggagttgctacagcaccgcagcaggtcttgtccaacggatggcccgtaagcaactttacctatagtcctgataccaaagttctggacatctgcgttgctctgctgatgggtgagcagttcctggtatcatggtgc

SEQ ID NO: 754 - protein, 944 aa, synthetic construct
  REGION 1..944: note = Variant of the Homo Sapiens Lysosomal alpha-glucosidase
MEWSWVFLFFLSVTTGVHSGHILWHDFSTVPRELSGSSQVLEETHPAHQVGASRPGPRDAQLHPGRPRAVPTQCDVPENSRFDCAPEKAITQEQCEARGCCYIPAKQGLQGAQMGQPWCFFPPSYPSYKLENLSQSEMGYTATLTRTTPSFFPKDILTLRLDVMMETENRLHFTIKDPANRRYEVPLETPHVHSRAPSPLYSVEFSEEPFGVIVRRQLDGRVLLNTTVAPLFFADQFLQLSTSLPSQYITGLAEHLSPLMLSTSWNKITLWNRDLAPTPGANLYGSHPFYLALEDGGSAHGVFLLNSNAMDVVLQPSPALSWRSTGGILDVYIFLGPEPKSVVQQYLDVVGYPFMPPYWGLGFHLCRWGYSSTAITRQVVENMTRAHFPLDVQWNDLDYMDSRRDFTFNKDGFRDFPAMVQELHQGGRRYMMIVDPGISSSGPAGSYRPYDEGLRRGVFITNETGQPLIGKVWPGSTAFPDFTNPEALAWWEDMVAEFHDQVPFDGMWIDMNEPSNFIRGSVDGCPNNELENPPYVPGVVGGTLQAATICASSHQFLSTHYNLHNLYGTTEAIASHRALVKARGTRPFVISRSTFAGHGRYAGHWTGDVWSSWEQLASSVPEILQFNLLGVPLVGADVCGFLGNTSEELCVRWTQLGAFYPFMRNHNSLTSLPQEPYSFSEPAQQAMRKALGLRYALLPHLYTLFHQAHVHGETVARPLFLEFPKDSSTWTVDHQMLWGEALLITPVLQPGKAEVTGYFPLGTWYDLQTVPVEALGSLPPPPAAPREPAIHSEGQWVTLPAPLDTINVHLREGYIIPLQGPGLTTTESRKQPMALAVALTKSGEARGELFWDDGESLEVLERGAYTQVIFEARNNTIVNELVHVTSEGAGLQLGKVTVLGVATAPQQVLSNGWPVSNFTYSPDTKVLDICVALLMGEQFLVSWC
